(19) United States
(12) Patent Application Publication
(10) Pub. No.: US 2020/0095579 A1
(43) Pub. Date: Mar. 26, 2020

(54) MATERIALS AND METHODS FOR TREATMENT OF MEROSIN-DEFICIENT COGENITAL MUSCULAR DYSTROPHY (MDCMD) AND OTHER LAMININ, ALPHA 2 (LAMA2) GENE RELATED CONDITIONS OR DISORDERS

(71) Applicant: CRISPR THERAPEUTICS AG, Zug (CH)

(72) Inventors: Ante Sven LUNDBERG, Cambridge, MA (US); Samarth KULKARNI, Cambridge, MA (US); Lawrence KLEIN, Cambridge, MA (US); Hari Kumar PADMANABHAN, Cambridge, MA (US)

(73) Assignee: CRISPR THERAPEUTICS AG, Zug (CH)

(21) Appl. No.: 16/487,796

(22) PCT Filed: Feb. 14, 2018
(86) PCT No.: PCT/IB2018/050908

§ 371 Date: Aug. 21, 2019

Related U.S. Application Data
(60) Provisional application No. 62/461,840, filed on Feb. 22, 2017.

(51) Int. Cl. C12N 15/113; C12N 15/86; A61K 35/34; C12N 15/90; C12N 9/22; C12N 5/077; C12N 5/074

(52) U.S. Cl. CPC C12N 15/113; C12N 15/86; A61K 35/34; C12N 15/907; C12N 9/22; C12N 2506/03; C12N 5/0658; C12N 5/0657; C12N 5/0607; C12N 2310/20; C12N 2750/14143; C12N 5/0661

(57) ABSTRACT

The present application provides materials and methods for treating a patient with one or more conditions or disorders associated with LAMA2, both ex vivo or in vivo. For example, the present disclosure provides materials and methods for treating a patient with Merosin-deficient Cogenital Muscular Dystrophy (MDCMD). The present application also provides materials and methods for editing a LAMA2 gene in a cell by genome editing. The present application also provides materials and methods for altering a contiguous genomic sequence of a LAMA2 gene in a cell. In addition, the present application provides one or more gRNAs for editing a LAMA2 gene. The present application also provides a therapeutic comprising at least one or more gRNAs for editing a LAMA2 gene. In addition, the present application provides a therapeutic for treating a patient with a LAMA2 related condition or disorder.

### FIELD

[0001] The present disclosure provides materials and methods for treating a patient with Merosin-deficient Cogenital Muscular Dystrophy (MDCMD) and other Laminin, Alpha 2 (LAMA2) gene related conditions or disorders, both ex vivo and in vivo.

### RELATED APPLICATIONS

[0002] This application is a national stage filing under 35 U.S.C. § 371 of International Application No. PCT/IB2018/050908, filed Feb. 14, 2018, which claims the benefit of U.S. Provisional Application No. 62/461,840 filed Feb. 22, 2017, the disclosure of each is hereby incorporated by reference in its entirety.

### INCORPORATION BY REFERENCE OF SEQUENCE LISTING

[0003] This application contains a Sequence Listing that has been submitted on compact disc and is hereby incorporated by reference in its entirety. The sequence listing consists of an ASCII text file named 170144PCT-CT61-PCT.txt, created Jan. 19, 2018, and is 142,918,000 bytes in size.

### BACKGROUND

[0004] Genome engineering refers to the strategies and techniques for the targeted, specific modification of the genetic information (genome) of living organisms. Genome engineering is a very active field of research because of the wide range of possible applications, particularly in the areas of human health; the correction of a gene carrying a harmful mutation, for example, or to explore the function of a gene. Early technologies developed to insert a transgene into a living cell were often limited by the random nature of the insertion of the new sequence into the genome. Random insertions into the genome may result in disrupting normal regulation of neighboring genes leading to severe unwanted effects. Furthermore, random integration technologies offer little reproducibility, as there is no guarantee that the sequence would be inserted at the same place in two different cells. Recent genome engineering strategies, such as zinc finger nucleases (ZFNs), transcription activator like effector nucleases (TALENs), homing endonucleases (HEs) and MegaTALs, enable a specific area of the DNA to be modified, thereby increasing the precision of the correction or insertion compared to early technologies. These newer platforms offer a much larger degree of reproducibility, but still have their limitations.

[0005] Despite efforts from researchers and medical professionals worldwide who have been trying to address genetic disorders, there still remains a critical need for developing safe and effective treatments for LAMA2 related disorders and conditions.

### SUMMARY

[0006] The present disclosure presents an approach to address the genetic basis of diseases related to the gene Laminin, Alpha 2 (LAMA2). Provided herein are cellular, ex vivo and in vivo methods for creating permanent changes to the genome of human cells that can result in a permanent correction of one or more mutations, replacement of one or more exons and/or introns, or insertion of one or more exons and/or introns within or near the LAMA2 gene or its regulatory genetic elements, which can restore LAMA2 function in the patient's cells, and ameliorate the effects of LAMA2 related conditions or disorders, such as Merosin-deficient Congenial Muscular Dystrophy (MDCMD), with as few as a single treatment.

[0007] Provided herein is a method for editing a LAMA2 gene in a cell by genome editing. The method can comprise: introducing into the cell one or more deoxyribonucleic acid (DNA) endonucleases to effect one or more single-strand breaks (SSBs) or double-strand breaks (DSBs) within or near the LAMA2 gene or LAMA2 regulatory elements that results in a permanent correction of one or more mutations or replacement of one or more exons and/or introns within or near the LAMA2 gene, thereby restoring the LAMA2 protein activity.

[0008] Also provided herein is a method for editing a LAMA2 gene in a cell by genome editing. The method can comprise: introducing into the cell one or more DNA endonucleases to effect one or more SSBs or DSBs within or near the LAMA2 gene or LAMA2 regulatory elements that results in a permanent insertion of one or more exons and/or introns within or near the LAMA2 gene, wherein the one or more exons and/or introns comprise the corrected LAMA2 gene sequence, thereby restoring expression of the corrected LAMA2 transcript.

[0009] Also provided herein is an ex vivo method for treating a patient having a LAMA2 related condition or disorder. The method can comprise: editing a muscle cell or muscle precursor cell within or near a LAMA2 gene or other DNA sequences that encode regulatory elements of the LAMA2 gene; and implanting the edited muscle cell or muscle precursor cell into the patient.

[0010] The editing step can comprise introducing into the muscle cell or muscle precursor cell one or more DNA endonucleases to effect one or more SSBs or DSBs within or near the LAMA2 gene or LAMA2 regulatory elements that results in a permanent correction of one or more mutations or replacement of one or more exons and/or introns within or near the LAMA2 gene, thereby restoring the LAMA2 protein activity.

[0011] The editing step can comprise introducing into the muscle cell or muscle precursor cell one or more DNA endonucleases to effect one or more SSBs or DSBs within or near the LAMA2 gene or LAMA2 regulatory elements that results in a permanent insertion of one or more exons and/or introns within or near the LAMA2 gene, wherein the one or more exons and/or introns comprise the corrected LAMA2 gene sequence, thereby restoring expression of the corrected LAMA2 transcript.

[0012] The muscle cell can be a skeletal muscle cell. The muscle cell can be a smooth muscle cell. The muscle cell can be a cardiac muscle cell.

[0013] Also provided herein is an ex vivo method for treating a patient having a LAMA2 related condition or disorder. The method can comprise: editing a patient specific induced pluripotent stem cell (iPSC) within or near a LAMA2 gene or other DNA sequences that encode regulatory elements of the LAMA2 gene; differentiating the edited iPSC into a skeletal muscle cell, a smooth muscle cell, a cardiac muscle cell or a Pax7+ myocyte progenitor cell; and implanting the skeletal muscle cell, smooth muscle cell, cardiac muscle cell or Pax7+ myocyte progenitor cell into the patient.

[0014] The editing step can comprise introducing into the iPSC one or more DNA endonucleases to effect one or more SSBs or DSBs within or near the LAMA2 gene or LAMA2 regulatory elements that results in a permanent correction of one or more mutations or replacement of one or more exons and/or introns within or near the LAMA2 gene, thereby restoring the LAMA2 protein activity.

[0015] The editing step can comprise introducing into the iPSC one or more DNA endonucleases to effect one or more SSBs or DSBs within or near the LAMA2 gene or LAMA2 regulatory elements that results in a permanent insertion of one or more exons and/or introns within or near the LAMA2 gene, wherein the one or more exons and/or introns comprise the corrected LAMA2 gene sequence, thereby restoring expression of the corrected LAMA2 transcript.

[0016] The method can further comprise: creating the iPSC, wherein the creating step comprises: isolating a somatic cell from the patient; and introducing a set of pluripotency-associated genes into the somatic cell to induce the somatic cell to become the iPSC. The somatic cell can be a fibroblast. The set of pluripotency-associated genes can be one or more of the genes selected from the group consisting of: OCT4, SOX2, KLF4, Lin28, NANOG and cMYC.

[0017] Also provided herein is an ex vivo method for treating a patient having a LAMA2 related condition or disorder. The method can comprise: editing a mesenchymal stem cell within or near a LAMA2 gene or other DNA sequences that encode regulatory elements of the LAMA2 gene; differentiating the edited mesenchymal stem cell into a skeletal muscle cell, a smooth muscle cell, a cardiac muscle cell or a Pax7+ myocyte progenitor cell; and implanting the skeletal muscle cell, smooth muscle cell, cardiac muscle cell or Pax7+ myocyte progenitor cell into the patient.

[0018] The editing step can comprise introducing into the mesenchymal stem cell one or more DNA endonucleases to effect one or more SSBs or DSBs within or near the LAMA2 gene or LAMA2 regulatory elements that results in a permanent correction of one or more mutations or replacement of one or more exons and/or introns within or near the LAMA2 gene, thereby restoring the LAMA2 protein activity.

[0019] The editing step can comprise introducing into the mesenchymal stem cell one or more DNA endonucleases to effect one or more SSBs or DSBs within or near the LAMA2 gene or LAMA2 regulatory elements that results in a permanent insertion of one or more exons and/or introns within or near the LAMA2 gene, wherein the one or more exons and/or introns comprise the corrected LAMA2 gene sequence, thereby restoring expression of the corrected LAMA2 transcript.

[0020] The methods can further comprise: isolating the mesenchymal stem cell from the patient, wherein the mesenchymal stem cell is isolated from the patient's bone marrow or peripheral blood. The isolating step can comprise: aspiration of bone marrow and isolation of mesenchymal cells using density gradient centrifugation media.

[0021] Also provided herein is an in vivo method for treating a patient with a LAMA2 related condition or disorder. The method can comprise: editing the LAMA2 gene in a cell of the patient.

[0022] The editing step can comprise: introducing into the cell one or more DNA endonucleases to effect one or more SSBs or DSBs within or near the LAMA2 gene or LAMA2 regulatory elements that results in a permanent correction of one or more mutations or replacement of one or more exons and/or introns within or near the LAMA2 gene, thereby restoring the LAMA2 protein activity.

[0023] The editing step can comprise: introducing into the cell one or more DNA endonucleases to effect one or more SSBs or DSBs within or near the LAMA2 gene or LAMA2 regulatory elements that results in a permanent insertion of one or more exons and/or introns within or near the LAMA2 gene, wherein the one or more exons and/or introns comprise the corrected LAMA2 gene sequence, thereby restoring expression of the corrected LAMA2 transcript.

[0024] The cell can be a muscle cell or muscle precursor cell. The muscle cell can be a skeletal muscle cell. The muscle cell can be a smooth muscle cell. The muscle cell can be a cardiac muscle cell.

[0025] The one or more DNA endonuclease can be delivered to the muscle cell or muscle precursor cell by local injection into the desired muscle.

[0026] The LAMA2 related condition or disorder can be MDCMD.

[0027] Also provided herein is a method of altering the contiguous genomic sequence of a LAMA2 gene in a cell. The method can comprise: contacting the cell with one or more DNA endonuclease to effect one or more SSBs or DSBs.

[0028] The alteration of the contiguous genomic sequence can occur in exon 1, intron 1, exon 2, intron 2, exon 3, intron 3, exon 4, intron 4, exon 5, intron 5, exon 6, intron 6, exon 7, intron 7, exon 8, intron 8, exon 9, intron 9, exon 10, intron 10, exon 11, intron 11, exon 12, intron 12, exon 13, intron 13, exon 14, intron 14, exon 15, intron 15, exon 16, intron 16, exon 17, intron 17, exon 18, intron 18, exon 19, intron 19, exon 20, intron 20, exon 21, intron 21, exon 22, intron 22, exon 23, intron 23, exon 24, intron 24, exon 25, intron 25, exon 26, intron 26, exon 27, intron 27, exon 28, intron 28, exon 29, intron 29, exon 30, intron 30, exon 31, intron 31, exon 32, intron 32, exon 33, intron 33, exon 34, intron 34, exon 35, intron 35, exon 36, intron 36, exon 37, intron 37, exon 38, intron 38, exon 39, intron 39, exon 40, intron 40, exon 41, intron 41, exon 42, intron 42, exon 43, intron 43, exon 44, intron 44, exon 45, intron 45, exon 46, intron 46, exon 47, intron 47, exon 48, intron 48, exon 49, intron 49, exon 50, intron 50, exon 51, intron 51, exon 52, intron 52, exon 53, intron 53, exon 54, intron 54, exon 55, intron 55, exon 56, intron 56, exon 57, intron 57, exon 58, intron 58, exon 59, intron 59, exon 60, intron 60, exon 61, intron 61, exon 62, intron 62, exon 63, intron 63, exon 64, intron 64, or exon 65 of the LAMA2 gene.

[0029] The alteration can result in a permanent correction of one or more mutations or replacement of one or more exons and/or introns within or near the LAMA2 gene, thereby restoring the LAMA2 protein activity. The alteration can result in a permanent insertion of one or more exons and/or introns of the LAMA2 gene, wherein the one or more exons and/or introns comprise the corrected LAMA2 gene sequence, thereby restoring expression of the corrected LAMA2 transcript.

[0030] The one or more DNA endonuclease can be selected from any of those sequences in SEQ ID NOs: 1-620 and variants having at least 90% homology to any of those sequences disclosed in SEQ ID NOs: 1-620. The one or more DNA endonuclease can be one or more proteins or polypeptides. The one or more proteins or polypeptides can be flanked at the N-terminus, the C-terminus, or both the N-terminus and C-terminus by one or more nuclear localization signals (NLSs). The one or more proteins or polypeptides can be flanked by two NLSs, one NLS located at the N-terminus and the second NLS located at the C-terminus. The one or more NLSs can be a SV40 NLS. The one or more DNA endonuclease can be one or more polynucleotide encoding the one or more DNA endonuclease. The one or more DNA endonuclease can be one or more ribonucleic acid (RNA) encoding the one or more DNA endonuclease. The one or more RNA can be one or more chemically modified RNA. The one or more RNA can be chemically modified in the coding region. The one or more polynucleotide or one or more RNA can be codon optimized.

[0031] The method can further comprise introducing into the cell one or more gRNA or one or more sgRNA. The one or more gRNA or one or more sgRNA can be chemically modified. The one or more modified sgRNAs can comprise three 2′-O-methyl-phosphorothioate residues at or near each of its 5′ and 3′ ends. The one or more gRNA or one or more sgRNA can comprise a spacer sequence that is complementary to a DNA sequence within or near exon 1, intron 1, exon 2, intron 2, exon 3, intron 3, exon 4, intron 4, exon 5, intron 5, exon 6, intron 6, exon 7, intron 7, exon 8, intron 8, exon 9, intron 9, exon 10, intron 10, exon 11, intron 11, exon 12, intron 12, exon 13, intron 13, exon 14, intron 14, exon 15, intron 15, exon 16, intron 16, exon 17, intron 17, exon 18, intron 18, exon 19, intron 19, exon 20, intron 20, exon 21, intron 21, exon 22, intron 22, exon 23, intron 23, exon 24, intron 24, exon 25, intron 25, exon 26, intron 26, exon 27, intron 27, exon 28, intron 28, exon 29, intron 29, exon 30, intron 30, exon 31, intron 31, exon 32, intron 32, exon 33, intron 33, exon 34, intron 34, exon 35, intron 35, exon 36, intron 36, exon 37, intron 37, exon 38, intron 38, exon 39, intron 39, exon 40, intron 40, exon 41, intron 41, exon 42, intron 42, exon 43, intron 43, exon 44, intron 44, exon 45, intron 45, exon 46, intron 46, exon 47, intron 47, exon 48, intron 48, exon 49, intron 49, exon 50, intron 50, exon 51, intron 51, exon 52, intron 52, exon 53, intron 53, exon 54, intron 54, exon 55, intron 55, exon 56, intron 56, exon 57, intron 57, exon 58, intron 58, exon 59, intron 59, exon 60, intron 60, exon 61, intron 61, exon 62, intron 62, exon 63, intron 63, exon 64, intron 64, or exon 65 of the LAMA2 gene.

[0032] The one or more gRNA or one or more sgRNA can be pre-complexed with the one or more DNA endonuclease to form one or more ribonucleoproteins (RNPs). The pre-complexing can involve a covalent attachment of the one or more gRNA or one or more sgRNA to the one or more DNA endonuclease. The weight ratio of sgRNA to DNA endonuclease in the RNP can be 1:1.

[0033] The one or more DNA endonuclease can be formulated in a liposome or lipid nanoparticle. The one or more DNA endonuclease can be formulated in a liposome or lipid nanoparticle which also comprises the one or more gRNA or one or more sgRNA. The one or more DNA endonuclease can be encoded in an AAV vector particle. The one or more gRNA or one or more sgRNA can be encoded in an AAV vector particle. The one or more DNA endonuclease can be encoded in an AAV vector particle which also encodes the one or more gRNA or one or more sgRNA. The AAV vector particle can be selected from the group consisting of any of those sequences disclosed in SEQ ID NOs: 4734-5302 and Table 2.

[0034] The method can further comprise: introducing into the cell a donor template comprising at least a portion of the wild-type or corrected LAMA2 gene. The at least a portion of the wild-type or corrected LAMA2 gene can comprise one or more sequences selected from the group consisting of a LAMA2 exon, a LAMA2 intron, and a sequence comprising an exon:intron junction of LAMA2. The donor template can comprise homologous arms to the genomic locus of the LAMA2 gene. The donor template can be either a single or double stranded polynucleotide. The donor template can be encoded in an AAV vector particle, and the AAV vector particle can be selected from the group consisting of any of those sequences disclosed in SEQ ID NOs: 4734-5302 and Table 2.

[0035] The one or more polynucleotide encoding one or more DNA endonuclease can be formulated into a lipid nanoparticle, and the one or more gRNA or one or more sgRNA can be delivered to the cell ex vivo by electroporation and the donor template can be delivered to the cell by an AAV vector. The one or more polynucleotide encoding one or more DNA endonuclease can be formulated into a liposome or lipid nanoparticle which also comprises the one or more gRNA or one or more sgRNA and the donor template.

[0036] The LAMA2 gene can be located on Chromosome 6: 128,883,141-129,516,563 (Genome Reference Consortium—GRCh38).

[0037] Also provided herein is a single-molecule guide RNA comprising at least a spacer sequence that is an RNA sequence corresponding to any one of SEQ ID NOs: 5305-415,443.

[0038] The single-molecule guide RNA can further comprise a spacer extension region. The single-molecule guide RNA can further comprise a tracrRNA extension region. The single-molecule guide RNA can be chemically modified. The single-molecule guide RNA can be pre-complexed with a DNA endonuclease. The DNA endonuclease can be a Cas9 or Cpf1 endonuclease. The Cas9 or Cpf1 endonuclease can be selected from the group consisting of: S. pyogenes Cas9, S. aureus Cas9, N. meningitidis Cas9, S. thermophilus CRISPR1 Cas9, S. thermophilus CRISPR 3 Cas9, T. denticola Cas9, L. bacterium ND2006 Cpf1 and Acidaminococcus sp. BV3L6 Cpf1, and variants having at least 90% homology to the endonucleases. The Cas9 or Cpf1 endonuclease can comprise one or more NLSs. At least one NLS can be at or within 50 amino acids of the amino-terminus of the Cas9 or Cpf1 endonuclease and/or at least one NLS can be at or within 50 amino acids of the carboxy-terminus of the Cas9 or Cpf1 endonuclease.

[0039] Also provided herein is a DNA encoding the single-molecule guide RNA.

[0040] Also provided herein is a therapeutic comprising at least one or more gRNAs for editing a LAMA2 gene in a cell from a patient with a LAMA2 related condition or disorder. The one or more gRNAs can comprise a spacer sequence selected from the group consisting of nucleic acid sequences in any one of SEQ ID NOs: 5305-415,443 of the Sequence Listing.

[0041] Also provided herein is a therapeutic for treating a patient with an LAMA2 related condition or disorder formed by the method comprising: introducing one or more DNA endonucleases; introducing one or more gRNA or one or more sgRNA for editing a LAMA2 gene; wherein the one or more gRNAs or sgRNAs comprise a spacer sequence selected from the group consisting of nucleic acid sequences in SEQ ID NOs: 5305-415,443 of the Sequence Listing.

[0042] The LAMA2 related condition or disorder can be MDCMD.

[0043] It is understood that the inventions described in this specification are not limited to the examples summarized in this Summary. Various other aspects are described and exemplified herein.

### BRIEF DESCRIPTION OF THE DRAWINGS

[0044] Various aspects of materials and methods disclosed and described in this specification can be better understood by reference to the accompanying figures, in which:

[0045] FIGS. 1A-B depict the type II CRISPR/Cas system;

[0046] FIG. 1A is a depiction of the type II CRISPR/Cas system including gRNA;

[0047] FIG. 1B is another depiction of the type II CRISPR/Cas system including sgRNA;

[0048] FIG. 2 describes the cutting efficiencies in the range of 10.8-95.7% of S. pyogenes gRNAs selected via an in-vitro transcribed (IVT) gRNA screen in HEK293T cells; and

[0049] FIG. 3 is a graph describing the cutting efficiencies in the range of 10.8-95.7% of S. pyogenes gRNAs in HEK293T cells.

### BRIEF DESCRIPTION OF SEQUENCE LISTING

[0050] SEQ ID NOs: 1-620 are Cas endonuclease ortholog sequences.

[0051] SEQ ID NOs: 621-631 do not include sequences.

[0052] SEQ ID NOs: 632-4715 are microRNA sequences.

[0053] SEQ ID NOs: 4716-4733 do not include sequences.

[0054] SEQ ID NOs: 4734-5302 are AAV serotype sequences.

[0055] SEQ ID NO: 5303 is a LAMA2 nucleotide sequence.

[0056] SEQ ID NO: 5304 is a gene sequence including 1-5 kilobase pairs upstream and/or downstream of the LAMA2 gene.

[0057] SEQ ID NOs: 5305-8387 are 20 bp spacer sequences for targeting within or near a LAMA2 gene or other DNA sequence that encodes a regulatory element of the LAMA2 gene with a T. denticola Cas9 endonuclease.

[0058] SEQ ID NOs: 8388-16,107 are 20 bp spacer sequences for targeting within or near a LAMA2 gene or other DNA sequence that encodes a regulatory element of the LAMA2 gene with a S. thermophilus Cas9 endonuclease.

[0059] SEQ ID NOs: 16,108-33,793 are 20 bp spacer sequences for targeting within or near a LAMA2 gene or other DNA sequence that encodes a regulatory element of the LAMA2 gene with a S. aureus Cas9 endonuclease.

[0060] SEQ ID NOs: 33,794-52,292 are 20 bp spacer sequences for targeting within or near a LAMA2 gene or other DNA sequence that encodes a regulatory element of the LAMA2 gene with a N. meningitidis Cas9 endonuclease.

[0061] SEQ ID NOs: 52,293-186,932 are 20 bp spacer sequences for targeting within or near a LAMA2 gene or other DNA sequence that encodes a regulatory element of the LAMA2 gene with a S. pyogenes Cas9 endonuclease.

[0062] SEQ ID NOs: 186,933-415,443 are 20 bp spacer sequences for targeting within or near a LAMA2 gene or other DNA sequence that encodes a regulatory element of the LAMA2 gene with an Acidaminococcus, a Lachnospiraceae, and a Franciscella Novicida Cpf1 endonuclease.

[0063] SEQ ID NOs: 415,444-415,473 do not include sequences.

[0064] SEQ ID NO: 415,474 is a sample spacer sequence, including the PAM, for a guide RNA (gRNA) for a S. pyogenes Cas9 endonuclease.

[0065] SEQ ID NOs: 415,475-415,477 show sample sgRNA sequences.

[0066] SEQ ID NO: 415,478 shows a known family of homing endonuclease, as classified by its structure.

### DETAILED DESCRIPTION

### I. INTRODUCTION

### Genome Editing

[0067] The present disclosure provides strategies and techniques for the targeted, specific alteration of the genetic information (genome) of living organisms. As used herein, the term “alteration” or “alteration of genetic information” refers to any change in the genome of a cell.

[0068] In the context of treating genetic disorders, alterations may include, but are not limited to, insertion, deletion and correction. As used herein, the term “insertion” refers to an addition of one or more nucleotides in a DNA sequence. Insertions can range from small insertions of a few nucleotides to insertions of large segments such as a cDNA or a gene. The term “deletion” refers to a loss or removal of one or more nucleotides in a DNA sequence or a loss or removal of the function of a gene. In some cases, a deletion can include, for example, a loss of a few nucleotides, an exon, an intron, a gene segment, or the entire sequence of a gene. In some cases, deletion of a gene refers to the elimination or reduction of the function or expression of a gene or its gene product. This can result from not only a deletion of sequences within or near the gene, but also other events (e.g., insertion, nonsense mutation) that disrupt the expression of the gene.

[0069] The term “correction” or “corrected” as used herein, refers to a change of one or more nucleotides of a genome in a cell, whether by insertion, deletion or substitution. Such correction may result in a more favorable genotypic or phenotypic outcome, whether in structure or function, to the genomic site which was corrected. One non-limiting example of a “correction” includes the correction of a mutant or defective sequence to a wild-type sequence which restores structure or function to a gene or its gene product(s). Depending on the nature of the mutation, correction may be achieved via various strategies disclosed herein. In one non-limiting example, a missense mutation may be corrected by replacing the region containing the mutation with its wild-type counterpart. As another example, duplication mutations (e.g., repeat expansions) in a gene may be corrected by removing the extra sequences.

[0070] In some aspects, alterations may also include a gene knock-in, knock-out or knock-down. As used herein, the term “knock-in” refers to an addition of a DNA sequence, or fragment thereof into a genome. Such DNA sequences to be knocked-in may include an entire gene or genes, may include regulatory sequences associated with a gene or any portion or fragment of the foregoing. For example, a cDNA encoding the wild-type protein may be inserted into the genome of a cell carrying a mutant gene. Knock-in strategies need not replace the defective gene, in whole or in part. In some cases, a knock-in strategy may further involve substitution of an existing sequence with the provided sequence, e.g., substitution of a mutant allele with a wild-type copy. On the other hand, the term “knock-out” refers to the elimination of a gene or the expression of a gene. For example, a gene can be knocked out by either a deletion or an addition of a nucleotide sequence that leads to a disruption of the reading frame. As another example, a gene may be knocked out by replacing a part of the gene with an irrelevant sequence. Finally, the term “knock-down” as used herein refers to reduction in the expression of a gene or its gene product(s). As a result of a gene knock-down, the protein activity or function may be attenuated or the protein levels may be reduced or eliminated.

[0071] Genome editing generally refers to the process of modifying the nucleotide sequence of a genome, preferably in a precise or pre-determined manner. Examples of methods of genome editing described herein include methods of using site-directed nucleases to cut deoxyribonucleic acid (DNA) at precise target locations in the genome, thereby creating single-strand or double-strand DNA breaks at particular locations within the genome. Such breaks can be and regularly are repaired by natural, endogenous cellular processes, such as homology-directed repair (HDR) and non-homologous end joining (NHEJ), as reviewed in Cox et al., Nature Medicine 21(2), 121-31 (2015). These two main DNA repair processes consist of a family of alternative pathways. NHEJ directly joins the DNA ends resulting from a double-strand break, sometimes with the loss or addition of nucleotide sequence, which may disrupt or enhance gene expression. HDR utilizes a homologous sequence, or donor sequence, as a template for inserting a defined DNA sequence at the break point. The homologous sequence can be in the endogenous genome, such as a sister chromatid. Alternatively, the donor can be an exogenous nucleic acid, such as a plasmid, a single-strand oligonucleotide, a double-stranded oligonucleotide, a duplex oligonucleotide or a virus, that has regions of high homology with the nuclease-cleaved locus, but which can also contain additional sequence or sequence changes including deletions that can be incorporated into the cleaved target locus. A third repair mechanism can be microhomology-mediated end joining (MMEJ), also referred to as “Alternative NHEJ,” in which the genetic outcome is similar to NHEJ in that small deletions and insertions can occur at the cleavage site. MMEJ can make use of homologous sequences of a few base pairs flanking the DNA break site to drive a more favored DNA end joining repair outcome, and recent reports have further elucidated the molecular mechanism of this process; see, e.g., Cho and Greenberg, Nature 518, 174-76 (2015); Kent et al., Nature Structural and Molecular Biology, Adv. Online doi:10.1038/nsmb.2961(2015); Mateos-Gomez etal., Nature 518, 254-57 (2015); Ceccaldi etal., Nature 528, 258-62 (2015). In some instances, it may be possible to predict likely repair outcomes based on analysis of potential microhomologies at the site of the DNA break.

[0072] Each of these genome editing mechanisms can be used to create desired genomic alterations. A step in the genome editing process can be to create one or two DNA breaks, the latter as double-strand breaks or as two single-stranded breaks, in the target locus as near the site of intended mutation. This can be achieved via the use of site-directed polypeptides, as described and illustrated herein.

### CRISPR Endonuclease System

[0073] A CRISPR (Clustered Regularly Interspaced Short Palindromic Repeats) genomic locus can be found in the genomes of many prokaryotes (e.g., bacteria and archaea). In prokaryotes, the CRISPR locus encodes products that function as a type of immune system to help defend the prokaryotes against foreign invaders, such as virus and phage. There are three stages of CRISPR locus function: integration of new sequences into the CRISPR locus, expression of CRISPR RNA (crRNA), and silencing of foreign invader nucleic acid. Five types of CRISPR systems (e.g., Type I, Type II, Type III, Type U, and Type V) have been identified.

[0074] A CRISPR locus includes a number of short repeating sequences referred to as “repeats.” When expressed, the repeats can form secondary structures (e.g., hairpins) and/or comprise unstructured single-stranded sequences. The repeats usually occur in clusters and frequently diverge between species. The repeats are regularly interspaced with unique intervening sequences referred to as “spacers,” resulting in a repeat-spacer-repeat locus architecture. The spacers are identical to or have high homology with known foreign invader sequences. A spacer-repeat unit encodes a crisprRNA (crRNA), which is processed into a mature form of the spacer-repeat unit. A crRNA comprises a “seed” or spacer sequence that is involved in targeting a target nucleic acid (in the naturally occurring form in prokaryotes, the spacer sequence targets the foreign invader nucleic acid). A spacer sequence is located at the 5′ or 3′ end of the crRNA.

[0075] A CRISPR locus also comprises polynucleotide sequences encoding CRISPR Associated (Cas) genes. Cas genes encode endonucleases involved in the biogenesis and the interference stages of crRNA function in prokaryotes. Some Cas genes comprise homologous secondary and/or tertiary structures.

### Type H CRISPR Systems

[0076] crRNA biogenesis in a Type II CRISPR system in nature requires a trans-activating CRISPR RNA (tracrRNA). Non-limiting examples of Type II CRISPR systems are shown in FIGS. 1A and 1B. The tracrRNA can be modified by endogenous RNaselll, and then hybridizes to a crRNA repeat in the pre-crRNA array. Endogenous RNaselll can be recruited to cleave the pre-crRNA. Cleaved crRNAs can be subjected to exoribonuclease trimming to produce the mature crRNA form (e.g., 5′ trimming). The tracrRNA can remain hybridized to the crRNA, and the tracrRNA and the crRNA associate with a site-directed polypeptide (e.g., Cas9). The crRNA of the crRNA-tracrRNA-Cas9 complex can guide the complex to a target nucleic acid to which the crRNA can hybridize. Hybridization of the crRNA to the target nucleic acid can activate Cas9 for targeted nucleic acid cleavage. The target nucleic acid in a Type II CRISPR system is referred to as a protospacer adjacent motif (PAM). In nature, the PAM is essential to facilitate binding of a site-directed polypeptide (e.g., Cas9) to the target nucleic acid. Type II systems (also referred to as Nmeni or CASS4) are further subdivided into Type II-A (CASS4) and II-B (CASS4a). Jinek et al., Science, 337(6096):816-821 (2012) showed that the CRISPR/Cas9 system is useful for RNA-programmable genome editing, and international patent application publication number WO2013/176772 provides numerous examples and applications of the CRISPR/Cas endonuclease system for site-specific gene editing.

### Type V CRISPR Systems

[0077] Type V CRISPR systems have several important differences from Type II systems. For example, Cpf1 is a single RNA-guided endonuclease that, in contrast to Type II systems, lacks tracrRNA. In fact, Cpf1-associated CRISPR arrays can be processed into mature crRNAs without the requirement of an additional trans-activating tracrRNA. The Type V CRISPR array can be processed into short mature crRNAs of 42-44 nucleotides in length, with each mature crRNA beginning with 19 nucleotides of direct repeat followed by 23-25 nucleotides of spacer sequence. In contrast, mature crRNAs in Type II systems can start with 20-24 nucleotides of spacer sequence followed by about 22 nucleotides of direct repeat. Also, Cpf1 can utilize a T-rich protospacer-adjacent motif such that Cpf1-crRNA complexes efficiently cleave target DNA preceded by a short T-rich PAM, which is in contrast to the G-rich PAM following the target DNA for Type II systems. Thus, Type V systems cleave at a point that is distant from the PAM, while Type II systems cleave at a point that is adjacent to the PAM. In addition, in contrast to Type II systems, Cpf1 cleaves DNA via a staggered DNA double-stranded break with a 4 or 5 nucleotide 5′ overhang. Type II systems cleave via a blunt double-stranded break. Similar to Type II systems, Cpf1 contains a predicted RuvC-like endonuclease domain, but lacks a second HNH endonuclease domain, which is in contrast to Type II systems.

### Cas Genes/Polypeptides and Protospacer Adjacent Motifs

[0078] Exemplary CRISPR/Cas polypeptides include the Cas9 polypeptides as published in Fonfara et al., Nucleic Acids Research, 42: 2577-2590 (2014). The CRISPR/Cas gene naming system has undergone extensive rewriting since the Cas genes were discovered. Fonfara et al. also provides PAM sequences for the Cas9 polypeptides from various species (see also Table 1 infra).

### II. COMPOSITIONS AND METHODS OF THE DISCLOSURE

### Editing Strategy

[0079] Provided herein are cellular, ex vivo and in vivo methods for using genome engineering tools to create permanent changes to the genome. In certain aspects these changes may include: 1) inserting a wild-type LAMA2 gene, a cDNA or a minigene (comprised of one or more exons and optionally one or more introns, including natural or synthetic introns) into the LAMA2 gene locus or a safe harbor locus, 2) deleting the mutant LAMA2 gene and inserting a wild-type LAMA2 gene, a cDNA or a minigene (comprised of one or more exons and optionally one or more introns, including natural or synthetic introns) into the LAMA2 gene locus or a safe harbor locus, or 3) correcting one or more mutations within or near the LAMA2 gene or other DNA sequences that encode regulatory elements of the LAMA2 gene. Such methods use endonucleases, such as CRISPR-associated (Cas9, Cpf1 and the like) nucleases, to permanently correct the entire gene or correct one or more mutations within or near the genomic locus of the LAMA2 gene or other DNA sequences that encode regulatory elements of the LAMA2 gene. In this way, examples set forth in the present disclosure can help to restore the LAMA2 gene function with as few as a single treatment (rather than deliver potential therapies for the lifetime of the patient).

[0080] The methods provided herein, regardless of whether a cellular or ex vivo or in vivo method, can involve one or a combination of the following: 1) using one or more gRNA for inserting one or more exons and/or introns within or near the LAMA2 gene wherein the one or more exons and/or introns comprise the corrected LAMA2 gene sequences; 2) using one or more gRNA for correcting one or more mutations within or near the LAMA2 gene or LAMA2 regulatory elements; 3) using one or more gRNA for replacing one or more exons and/or intons within or near the LAMA2 gene.

[0081] In the first editing strategy, a wild-type or corrected LAMA2 gene, a cDNA or a minigene (comprised of one or more exons and optionally one or more introns, including natural or synthetic introns) can be inserted into a locus of the LAMA2 gene. In certain aspects, this can be achieved by delivering into the cell one or more CRISPR endonucleases, one or more gRNAs (e.g., crRNA+tracrRNA, or sgRNA) targeting upstream, downstream, or within an intron or exon of the LAMA2 gene, and a donor DNA that contains the desired sequence and homology arms to the flanking regions of the target locus. In certain aspects, this can be achieved by delivering into the cell one or more CRISPR endonucleases, a pair of gRNAs (e.g., crRNA+tracrRNA, or sgRNA) targeting upstream, downstream or within intron 34 of the LAMA2 gene, and a donor DNA that contains the desired sequence and homology arms to the flanking regions of the target locus. The cytogenetic location of the LAMA2 gene is 6q22.33. Alternatively, the wild-type or corrected LAMA2 gene, cDNA or a minigene (comprised of one or more exons and optionally introns, including natural or synthetic introns) can be inserted into a safe harbor locus. A “safe harbor locus” refers to a region of the genome where the integrated material can be adequately expressed without perturbing endogenous gene structure or function. The safe harbor loci include but are not limited to AAVS1 (intron 1 of PPP1R12C), HPRT, H11, hRosa26 and/or F-A region. The safe harbor loci may be exons or introns of ubiquitously expressed genes and/or genes with tissue specific expression (e.g.: muscle). Safe harbor loci can be selected from the group consisting of: exon 1, intron 1 or exon 2 of PPP1R12C, exon 1, intron 1 or exon 2 of HPRT, and exon 1, intron 1 or exon 2 of hRosa26. A safe harbor locus may also include a region of the genome devoid of endogeneous genes and with open chromatin that allows for the expression of the inserted transgene without perturbing the genome structure or function.

[0082] The donor DNA can be single or double stranded DNA. The donor template can have homologous arms to the 6q22.33 region. The donor template can have homologous arms to a safe harbor locus. For example, the donor template can have homologous arms to an AAVS1 safe harbor locus, such as, intron 1 of the PPP1R12C gene. As another example, the donor template can have homologous arms to a hRosa26 safe harbor locus.

[0083] In the second and third editing strategies, one or more mutated sequences in the LAMA2 gene can be replaced with wild-type or corrected sequences by inducing one single stranded break or double stranded break in the LAMA2 gene with one or more CRISPR endonucleases and a gRNA (e.g., crRNA+tracrRNA, or sgRNA), or two or more single stranded breaks or double stranded breaks in the LAMA2 gene with one or more CRISPR endonucleases and two or more gRNAs, in the presence of a donor DNA template introduced exogenously to direct the cellular DSB response to Homology-Directed Repair (the donor DNA template can be a short single stranded oligonucleotide, a short double stranded oligonucleotide, a long single or double stranded DNA molecule). This strategy can be used to correct one or more mutations in one or more exons, introns, intron:exon junctions, or other DNA sequences encoding regulatory elements of the LAMA2 gene, or combination thereof. This strategy may be employed to correct mutational hotspots within or near the LAMA2 gene. The term “mutational hotspot” used herein refers to a region in a genome that exhibits higher frequency of mutations or has higher propensity to mutate compared to the average mutation frequency or mutation rate in said genome. This approach can require development and optimization of gRNAs and donor DNA molecules for the LAMA2 gene.

[0084] Alternatively, NHEJ may be used to restore the reading frame in the LAMA2 gene by inducing one single stranded break or double stranded break in the LAMA2 gene with one or more CRISPR endonucleases and a gRNA (e.g., crRNA+tracrRNA, or sgRNA), or two or more single stranded breaks or double stranded breaks in the gene of interest with two or more CRISPR endonucleases and two or more sgRNAs. This approach can require development and optimization of sgRNAs for the LAMA2 gene.

[0085] The advantages for the above strategies are similar, including in principle both short and long term beneficial clinical and laboratory effects. The whole gene correction approach does provide one advantage over the mutational correction approach—the ability to treat all patients versus only a subset of patients.

[0086] In addition to the above genome editing strategies, another strategy involves modulating expression, function, or activity of LAMA2 by editing in the regulatory sequence.

[0087] In addition to the editing options listed above, Cas9 or similar proteins can be used to target effector domains to the same target sites that can be identified for editing, or additional target sites within range of the effector domain. A range of chromatin modifying enzymes, methylases, or demethylases can be used to alter expression of the target gene. One possibility is increasing the expression of the LAMA2 protein if the mutation leads to lower activity. These types of epigenetic regulation have some advantages, particularly as they are limited in possible off-target effects.

[0088] A number of types of genomic target sites can be present in addition to mutations in the coding and splicing sequences.

[0089] The regulation of transcription and translation implicates a number of different classes of sites that interact with cellular proteins or nucleotides. Often the DNA binding sites of transcription factors or other proteins can be targeted for mutation or deletion to study the role of the site, though they can also be targeted to change gene expression. Sites can be added through non-homologous end joining NHEJ or direct genome editing by homology directed repair (HDR). Increased use of genome sequencing, RNA expression and genome-wide studies of transcription factor binding have increased our ability to identify how the sites lead to developmental or temporal gene regulation. These control systems can be direct or can involve extensive cooperative regulation that can require the integration of activities from multiple enhancers. Transcription factors typically bind 6-12 bp-long degenerate DNA sequences. The low level of specificity provided by individual sites suggests that complex interactions and rules are involved in binding and the functional outcome. Binding sites with less degeneracy can provide simpler means of regulation. Artificial transcription factors can be designed to specify longer sequences that have less similar sequences in the genome and have lower potential for off-target cleavage. Any of these types of binding sites can be mutated, deleted or even created to enable changes in gene regulation or expression (Canver, M. C. et al., Nature (2015)).

### Site-Directed Polypeptides (Endonucleases, Enzymes)

[0090] A site-directed polypeptide is a nuclease used in genome editing to cleave DNA. The site-directed polypeptide can be administered to a cell or a patient as either: one or more polypeptides, or one or more mRNAs encoding the polypeptide. Any of the enzymes or orthologs listed in SEQ ID NOs: 1-620, or disclosed herein may be utilized in the methods herein. Single-molecule guide RNA can be pre-complexed with a site-directed polypeptide. The site-directed polypeptide can be any of the DNA endonuclease disclosed herein.

[0091] In the context of a CRISPR/Cas9 or CRISPR/Cpf1 system, the site-directed polypeptide can bind to a guide RNA that, in turn, specifies the site in the target DNA to which the polypeptide is directed. In the CRISPR/Cas9 or CRISPR/Cpf1 systems disclosed herein, the site-directed polypeptide can be an endonuclease, such as a DNA endonuclease.

[0092] A site-directed polypeptide can comprise a plurality of nucleic acid-cleaving (i.e., nuclease) domains. Two or more nucleic acid-cleaving domains can be linked together via a linker. For example, the linker can comprise a flexible linker. Linkers can comprise 1, 2, 3, 4, 5, 6, 7, 8, 9, 10, 11, 12, 13, 14, 15, 16, 17, 18, 19, 20, 21, 22, 23, 24, 25, 30, 35, 40 or more amino acids in length.

[0093] Naturally-occurring wild-type Cas9 enzymes comprise two nuclease domains, a HNH nuclease domain and a RuvC domain. Herein, the term “Cas9” refers to both a naturally-occurring and a recombinant Cas9. Cas9 enzymes contemplated herein can comprise a HNH or HNH-like nuclease domain, and/or a RuvC or RuvC-like nuclease domain.

[0094] HNH or HNH-like domains comprise a McrA-like fold. HNH or HNH-like domains comprises two antiparallel (3-strands and an a-helix. HNH or HNH-like domains comprises a metal binding site (e.g., a divalent cation binding site). HNH or HNH-like domains can cleave one strand of a target nucleic acid (e.g., the complementary strand of the crRNA targeted strand).

[0095] RuvC or RuvC-like domains comprise an RNaseH or RNaseH-like fold. RuvC/RNaseH domains are involved in a diverse set of nucleic acid-based functions including acting on both RNA and DNA. The RNaseH domain comprises 5 (3-strands surrounded by a plurality of a-helices. RuvC/RNaseH or RuvC/RNaseH-like domains comprise a metal binding site (e.g., a divalent cation binding site). RuvC/RNaseH or RuvC/RNaseH-like domains can cleave one strand of a target nucleic acid (e.g., the non-complementary strand of a double-stranded target DNA).

[0096] Site-directed polypeptides can introduce double-strand breaks or single-strand breaks in nucleic acids, e.g., genomic DNA. The double-strand break can stimulate a cell's endogenous DNA-repair pathways (e.g., homology-dependent repair (HDR) or NHEJ or alternative non-homologous end joining (A-NHEJ) or microhomology-mediated end joining (MMEJ)). NHEJ can repair cleaved target nucleic acid without the need for a homologous template. This can sometimes result in small deletions or insertions (indels) in the target nucleic acid at the site of cleavage, and can lead to disruption or alteration of gene expression. HDR can occur when a homologous repair template, or donor, is available. The homologous donor template can comprise sequences that are homologous to sequences flanking the target nucleic acid cleavage site. The sister chromatid can be used by the cell as the repair template. However, for the purposes of genome editing, the repair template can be supplied as an exogenous nucleic acid, such as a plasmid, duplex oligonucleotide, single-strand oligonucleotide or viral nucleic acid. With exogenous donor templates, an additional nucleic acid sequence (such as a transgene) or modification (such as a single or multiple base change or a deletion) can be introduced between the flanking regions of homology so that the additional or altered nucleic acid sequence also becomes incorporated into the target locus. MMEJ can result in a genetic outcome that is similar to NHEJ in that small deletions and insertions can occur at the cleavage site. MMEJ can make use of homologous sequences of a few base pairs flanking the cleavage site to drive a favored end-joining DNA repair outcome. In some instances, it may be possible to predict likely repair outcomes based on analysis of potential microhomologies in the nuclease target regions.

[0097] Thus, in some cases, homologous recombination can be used to insert an exogenous polynucleotide sequence into the target nucleic acid cleavage site. An exogenous polynucleotide sequence is termed a “donor polynucleotide” (or donor or donor sequence) herein. The donor polynucleotide, a portion of the donor polynucleotide, a copy of the donor polynucleotide, or a portion of a copy of the donor polynucleotide can be inserted into the target nucleic acid cleavage site. The donor polynucleotide can be an exogenous polynucleotide sequence, i.e., a sequence that does not naturally occur at the target nucleic acid cleavage site.

[0098] The modifications of the target DNA due to NHEJ and/or HDR can lead to, for example, mutations, deletions, alterations, integrations, gene correction, gene replacement, gene tagging, transgene insertion, nucleotide deletion, gene disruption, translocations and/or gene mutation. The processes of deleting genomic DNA and integrating non-native nucleic acid into genomic DNA are examples of genome editing.

[0099] The site-directed polypeptide can comprise an amino acid sequence having at least 10%, at least 15%, at least 20%, at least 30%, at least 40%, at least 50%, at least 60%, at least 70%, at least 75%, at least 80%, at least 85%, at least 90%, at least 95%, at least 99%, or 100% amino acid sequence identity to a wild-type exemplary site-directed polypeptide [e.g., Cas9 from S. pyogenes, US2014/0068797 Sequence ID No. 8 or Sapranauskas et al., Nucleic Acids Res, 39(21): 9275-9282 (2011)], and various other site-directed polypeptides. The site-directed polypeptide can comprise at least 70, 75, 80, 85, 90, 95, 97, 99, or 100% identity to a wild-type site-directed polypeptide (e.g., Cas9 from S. pyogenes, supra) over 10 contiguous amino acids. The site-directed polypeptide can comprise at most: 70, 75, 80, 85, 90, 95, 97, 99, or 100% identity to a wild-type site-directed polypeptide (e.g., Cas9 from S. pyogenes, supra) over 10 contiguous amino acids. The site-directed polypeptide can comprise at least: 70, 75, 80, 85, 90, 95, 97, 99, or 100% identity to a wild-type site-directed polypeptide (e.g., Cas9 from S. pyogenes, supra) over 10 contiguous amino acids in a HNH nuclease domain of the site-directed polypeptide. The site-directed polypeptide can comprise at most: 70, 75, 80, 85, 90, 95, 97, 99, or 100% identity to a wild-type site-directed polypeptide (e.g., Cas9 from S. pyogenes, supra) over 10 contiguous amino acids in a HNH nuclease domain of the site-directed polypeptide. The site-directed polypeptide can comprise at least: 70, 75, 80, 85, 90, 95, 97, 99, or 100% identity to a wild-type site-directed polypeptide (e.g., Cas9 from S. pyogenes, supra) over 10 contiguous amino acids in a RuvC nuclease domain of the site-directed polypeptide. The site-directed polypeptide can comprise at most: 70, 75, 80, 85, 90, 95, 97, 99, or 100% identity to a wild-type site-directed polypeptide (e.g., Cas9 from S. pyogenes, supra) over 10 contiguous amino acids in a RuvC nuclease domain of the site-directed polypeptide.

[0100] The site-directed polypeptide can comprise a modified form of a wild-type exemplary site-directed polypeptide. The modified form of the wild-type exemplary site-directed polypeptide can comprise a mutation that reduces the nucleic acid-cleaving activity of the site-directed polypeptide. The modified form of the wild-type exemplary site-directed polypeptide can have less than 90%, less than 80%, less than 70%, less than 60%, less than 50%, less than 40%, less than 30%, less than 20%, less than 10%, less than 5%, or less than 1% of the nucleic acid-cleaving activity of the wild-type exemplary site-directed polypeptide (e.g., Cas9 from S. pyogenes, supra). The modified form of the site-directed polypeptide can have no substantial nucleic acid-cleaving activity. When a site-directed polypeptide is a modified form that has no substantial nucleic acid-cleaving activity, it is referred to herein as “enzymatically inactive.”

[0101] The modified form of the site-directed polypeptide can comprise a mutation such that it can induce a single-strand break (SSB) on a target nucleic acid (e.g., by cutting only one of the sugar-phosphate backbones of a double-strand target nucleic acid). In some aspects, the mutation can result in less than 90%, less than 80%, less than 70%, less than 60%, less than 50%, less than 40%, less than 30%, less than 20%, less than 10%, less than 5%, or less than 1% of the nucleic acid-cleaving activity in one or more of the plurality of nucleic acid-cleaving domains of the wild-type site directed polypeptide (e.g., Cas9 from S. pyogenes, supra). In some aspects, the mutation can result in one or more of the plurality of nucleic acid-cleaving domains retaining the ability to cleave the complementary strand of the target nucleic acid, but reducing its ability to cleave the non-complementary strand of the target nucleic acid. The mutation can result in one or more of the plurality of nucleic acid-cleaving domains retaining the ability to cleave the non-complementary strand of the target nucleic acid, but reducing its ability to cleave the complementary strand of the target nucleic acid. For example, residues in the wild-type exemplary S. pyogenes Cas9 polypeptide, such as Asp10, His840, Asn854 and Asn856, are mutated to inactivate one or more of the plurality of nucleic acid-cleaving domains (e.g., nuclease domains). The residues to be mutated can correspond to residues Asp10, His840, Asn854 and Asn856 in the wild-type exemplary S. pyogenes Cas9 polypeptide (e.g., as determined by sequence and/or structural alignment). Non-limiting examples of mutations include D10A, H840A, N854A or N856A. One skilled in the art will recognize that mutations other than alanine substitutions can be suitable.

[0102] In some aspects, a D10A mutation can be combined with one or more of H840A, N854A, or N856A mutations to produce a site-directed polypeptide substantially lacking DNA cleavage activity. A H840A mutation can be combined with one or more of D10A, N854A, or N856A mutations to produce a site-directed polypeptide substantially lacking DNA cleavage activity. A N854A mutation can be combined with one or more of H840A, D10A, or N856A mutations to produce a site-directed polypeptide substantially lacking DNA cleavage activity. A N856A mutation can be combined with one or more of H840A, N854A, or D10A mutations to produce a site-directed polypeptide substantially lacking DNA cleavage activity. Site-directed polypeptides that comprise one substantially inactive nuclease domain are referred to as “nickases.”

[0103] Nickase variants of RNA-guided endonucleases, for example Cas9, can be used to increase the specificity of CRISPR-mediated genome editing. Wild type Cas9 is typically guided by a single guide RNA designed to hybridize with a specified -20 nucleotide sequence in the target sequence (such as an endogenous genomic locus). However, several mismatches can be tolerated between the guide RNA and the target locus, effectively reducing the length of required homology in the target site to, for example, as little as 13 nt of homology, and thereby resulting in elevated potential for binding and double-strand nucleic acid cleavage by the CRISPR/Cas9 complex elsewhere in the target genome—also known as off-target cleavage. Because nickase variants of Cas9 each only cut one strand, in order to create a double-strand break it is necessary for a pair of nickases to bind in close proximity and on opposite strands of the target nucleic acid, thereby creating a pair of nicks, which is the equivalent of a double-strand break. This requires that two separate guide RNAs—one for each nickase—must bind in close proximity and on opposite strands of the target nucleic acid. This requirement essentially doubles the minimum length of homology needed for the double-strand break to occur, thereby reducing the likelihood that a double-strand cleavage event will occur elsewhere in the genome, where the two guide RNA sites—if they exist—are unlikely to be sufficiently close to each other to enable the double-strand break to form. As described in the art, nickases can also be used to promote HDR versus NHEJ. HDR can be used to introduce selected changes into target sites in the genome through the use of specific donor sequences that effectively mediate the desired changes.

[0104] Mutations contemplated can include substitutions, additions, and deletions, or any combination thereof. The mutation converts the mutated amino acid to alanine. The mutation converts the mutated amino acid to another amino acid (e.g., glycine, serine, threonine, cysteine, valine, leucine, isoleucine, methionine, proline, phenylalanine, tyrosine, tryptophan, aspartic acid, glutamic acid, asparagine, glutamine, histidine, lysine, or arginine). The mutation converts the mutated amino acid to a non-natural amino acid (e.g., selenomethionine). The mutation converts the mutated amino acid to amino acid mimics (e.g., phosphomimics). The mutation can be a conservative mutation. For example, the mutation converts the mutated amino acid to amino acids that resemble the size, shape, charge, polarity, conformation, and/or rotamers of the mutated amino acids (e.g., cysteine/serine mutation, lysine/asparagine mutation, histidine/phenylalanine mutation). The mutation can cause a shift in reading frame and/or the creation of a premature stop codon. Mutations can cause changes to regulatory regions of genes or loci that affect expression of one or more genes.

[0105] The site-directed polypeptide (e.g., variant, mutated, enzymatically inactive and/or conditionally enzymatically inactive site-directed polypeptide) can target nucleic acid. The site-directed polypeptide (e.g., variant, mutated, enzymatically inactive and/or conditionally enzymatically inactive endoribonuclease) can target DNA. The site-directed polypeptide (e.g., variant, mutated, enzymatically inactive and/or conditionally enzymatically inactive endoribonuclease) can target RNA.

[0106] The site-directed polypeptide can comprise one or more non-native sequences (e.g., the site-directed polypeptide is a fusion protein).

[0107] The site-directed polypeptide can comprise an amino acid sequence comprising at least 15% amino acid identity to a Cas9 from a bacterium (e.g., S. pyogenes), a nucleic acid binding domain, and two nucleic acid cleaving domains (i.e., a HNH domain and a RuvC domain).

[0108] The site-directed polypeptide can comprise an amino acid sequence comprising at least 15% amino acid identity to a Cas9 from a bacterium (e.g., S. pyogenes), and two nucleic acid cleaving domains (i.e., a HNH domain and a RuvC domain).

[0109] The site-directed polypeptide can comprise an amino acid sequence comprising at least 15% amino acid identity to a Cas9 from a bacterium (e.g., S. pyogenes), and two nucleic acid cleaving domains, wherein one or both of the nucleic acid cleaving domains comprise at least 50% amino acid identity to a nuclease domain from Cas9 from a bacterium (e.g., S. pyogenes).

[0110] The site-directed polypeptide can comprise an amino acid sequence comprising at least 15% amino acid identity to a Cas9 from a bacterium (e.g., S. pyogenes), two nucleic acid cleaving domains (i.e., a HNH domain and a RuvC domain), and a non-native sequence (for example, a nuclear localization signal) or a linker linking the site-directed polypeptide to a non-native sequence.

[0111] The site-directed polypeptide can comprise an amino acid sequence comprising at least 15% amino acid identity to a Cas9 from a bacterium (e.g., S. pyogenes), two nucleic acid cleaving domains (i.e., a HNH domain and a RuvC domain), wherein the site-directed polypeptide comprises a mutation in one or both of the nucleic acid cleaving domains that reduces the cleaving activity of the nuclease domains by at least 50%.

[0112] The site-directed polypeptide can comprise an amino acid sequence comprising at least 15% amino acid identity to a Cas9 from a bacterium (e.g., S. pyogenes), and two nucleic acid cleaving domains (i.e., a HNH domain and a RuvC domain), wherein one of the nuclease domains comprises mutation of aspartic acid 10, and/or wherein one of the nuclease domains can comprise a mutation of histidine 840, and wherein the mutation reduces the cleaving activity of the nuclease domain(s) by at least 50%.

[0113] The one or more site-directed polypeptides, e.g. DNA endonucleases, can comprise two nickases that together effect one double-strand break at a specific locus in the genome, or four nickases that together effect or cause two double-strand breaks at specific loci in the genome. Alternatively, one site-directed polypeptide, e.g. DNA endonuclease, can effect or cause one double-strand break at a specific locus in the genome.

[0114] Non-limiting examples of Cas9 orthologs from other bacterial strains include but are not limited to, Cas proteins identified in Acaryochloris marina MBIC11017; Acetohalobium arabaticum DSM 5501; Acidithiobacillus caldus; Acidithiobacillus ferrooxidans ATCC 23270; Alicyclobacillus acidocaldarius LAA1; Alicyclobacillus acidocaldarius subsp. acidocaldarius DSM 446; Allochromatium vinosum DSM 180; Ammonifex degensii KC4; Anabaena variabilis ATCC 29413; Arthrospira maxima CS-328; Arthrospira platensis str. Paraca; Arthrospira sp. PCC 8005; Bacillus pseudomycoides DSM 12442; Bacillus selenitireducens MLS10; Burkholderiales bacterium 1_1_47; Caldicelulosiruptor becscii DSM 6725; Candidatus Desulforudis audaxviator MP104C; Caldicellulosiruptor hydrothermalis_108; Clostridium phage c-st; Clostridium botulinum A3 str. Loch Maree; Clostridium botulinum Ba4 str. 657; Clostridium difficile QCD-63q42; Crocosphaera watsonii WH 8501; Cyanothece sp. ATCC 51142; Cyanothece sp. CCY0110; Cyanothece sp. PCC 7424; Cyanothece sp. PCC 7822; Exiguobacterium sibiricum 255-15; Finegoldia magna ATCC 29328; Ktedonobacter racemifer DSM 44963; Lactobacillus delbrueckii subsp. bulgaricus PB2003/044-T3-4; Lactobacillus salivarius ATCC 11741; Listeria innocua; Lyngbya sp. PCC 8106; Marinobacter sp. ELB17; Methanohalobium evestigatum Z-7303; Microcystis phage Ma-LMM01; Microcystis aeruginosa NIES-843; Microscilla marina ATCC 23134; Microcoleus chthonoplastes PCC 7420; Neisseria meningitidis; Nitrosococcus halophilus Nc4; Nocardiopsis dassonvillei subsp. dassonvillei DSM 43111; Nodularia spumigena CCY9414; Nostoc sp. PCC 7120; Oscillatoria sp. PCC 6506; Pelotomaculum thermopropionicum SI; Petrotoga mobilis SJ95; Polaromonas naphthalenivorans CJ2; Polaromonas sp. JS666; Pseudoalteromonas haloplanktis TAC125; Streptomyces pristinaespiralis ATCC 25486; Streptomyces pristinaespiralis ATCC 25486; Streptococcus thermophilus; Streptomyces viridochromogenes DSM 40736; Streptosporangium roseum DSM 43021; Synechococcus sp. PCC 7335; and Thermosipho africanus TCF52B (Chylinski et al., RNA Biol., 2013; 10(5): 726-737).

[0115] In addition to Cas9 orthologs, other Cas9 variants such as fusion proteins of inactive dCas9 and effector domains with different functions may be served as a platform for genetic modulation. Any of the foregoing enzymes may be useful in the present disclosure.

[0116] Further examples of endonucleases that may be utilized in the present disclosure are provided in SEQ ID NOs: 1-620. These proteins may be modified before use or may be encoded in a nucleic acid sequence such as a DNA, RNA or mRNA or within a vector construct such as the plasmids or AAV vectors taught herein. Further, they may be codon optimized.

[0117] SEQ ID NOs: 1-620 disclose a non-exhaustive listing of endonuclease sequences. Genome-targeting Nucleic Acid

[0118] The present disclosure provides a genome-targeting nucleic acid that can direct the activities of an associated polypeptide (e.g., a site-directed polypeptide) to a specific target sequence within a target nucleic acid. The genome-targeting nucleic acid can be an RNA. A genome-targeting RNA is referred to as a “guide RNA” or “gRNA” herein. A guide RNA can comprise at least a spacer sequence that hybridizes to a target nucleic acid sequence of interest, and a CRISPR repeat sequence. In Type II systems, the gRNA also comprises a second RNA called the tracrRNA sequence. In the Type II guide RNA (gRNA), the CRISPR repeat sequence and tracrRNA sequence hybridize to each other to form a duplex. In the Type V guide RNA (gRNA), the crRNA forms a duplex. In both systems, the duplex can bind a site-directed polypeptide, such that the guide RNA and site-direct polypeptide form a complex. The genome-targeting nucleic acid can provide target specificity to the complex by virtue of its association with the site-directed polypeptide. The genome-targeting nucleic acid thus can direct the activity of the site-directed polypeptide.

[0119] Exemplary guide RNAs include the spacer sequences in SEQ ID NOs: 5305-415,443 of the Sequence Listing. Each guide RNA can be designed to include a spacer sequence complementary to its genomic target sequence. For example, each of the spacer sequences in SEQ ID NOs: 5305-415,443 of the Sequence Listing can be put into a single RNA chimera or a crRNA (along with a corresponding tracrRNA). See Jinek et al., Science, 337, 816-821 (2012) and Deltcheva et al., Nature, 471, 602-607 (2011).

[0120] The genome-targeting nucleic acid can be a double-molecule guide RNA. The genome-targeting nucleic acid can be a single-molecule guide RNA.

[0121] A double-molecule guide RNA can comprise two strands of RNA. The first strand comprises in the 5′ to 3′ direction, an optional spacer extension sequence, a spacer sequence and a minimum CRISPR repeat sequence. The second strand can comprise a minimum tracrRNA sequence (complementary to the minimum CRISPR repeat sequence), a 3′ tracrRNA sequence and an optional tracrRNA extension sequence.

[0122] A single-molecule guide RNA (sgRNA) in a Type II system can comprise, in the 5′ to 3′ direction, an optional spacer extension sequence, a spacer sequence, a minimum CRISPR repeat sequence, a single-molecule guide linker, a minimum tracrRNA sequence, a 3′ tracrRNA sequence and an optional tracrRNA extension sequence. The optional tracrRNA extension can comprise elements that contribute additional functionality (e.g., stability) to the guide RNA. The single-molecule guide linker can link the minimum CRISPR repeat and the minimum tracrRNA sequence to form a hairpin structure. The optional tracrRNA extension can comprise one or more hairpins.

[0123] The sgRNA can comprise a 20 nucleotide spacer sequence at the 5′ end of the sgRNA sequence. The sgRNA can comprise a less than a 20 nucleotide spacer sequence at the 5′ end of the sgRNA sequence. The sgRNA can comprise a more than 20 nucleotide spacer sequence at the 5′ end of the sgRNA sequence. The sgRNA can comprise a variable length spacer sequence with 17-30 nucleotides at the 5′ end of the sgRNA sequence (see Table 1).

[0124] The sgRNA can comprise no uracil at the 3′ end of the sgRNA sequence, such as in SEQ ID NO: 415,476 of Table 1. The sgRNA can comprise one or more uracil at the 3′ end of the sgRNA sequence, such as in SEQ ID NO: 415,477 in Table 1. For example, the sgRNA can comprise 1 uracil (U) at the 3′ end of the sgRNA sequence. The sgRNA can comprise 2 uracil (UU) at the 3′ end of the sgRNA sequence. The sgRNA can comprise 3 uracil (UUU) at the 3′ end of the sgRNA sequence. The sgRNA can comprise 4 uracil (UUUU) at the 3′ end of the sgRNA sequence. The sgRNA can comprise 5 uracil (UUUUU) at the 3′ end of the sgRNA sequence. The sgRNA can comprise 6 uracil (UUUUUU)at the 3′ end of the sgRNA sequence. The sgRNA can comprise 7 uracil (UUUUUUU)at the 3′ end of the sgRNA sequence. The sgRNA can comprise 8 uracil (UUUUUUUU) at the 3′ end of the sgRNA sequence.

[0125] The sgRNA can be unmodified or modified. For example, modified sgRNAs can comprise one or more 2′-O-methyl phosphorothioate nucleotides.

TABLE 1

| SEQ ID NO. | sgRNA sequence |
|---|---|
| 415, 475 | nnnnnnnnnnnnnnnnnnnnguuuuagagcuagaaau |
| | agcaaguuaaaauaaggcuaguccguuaucaacuuga |
| | aaaaguggcaccgagucggugcuuuu |
| 415, 476 | nnnnnnnnnnnnnnnnnnnnguuuuagagcuagaaau |
| | agcaaguuaaaauaaggcuaguccguuaucaacuuga |
| | aaaaguggcaccgagucggugc |
| 415, 477 | n₍₁₇₋₃₀₎guuuuagagcuagaaauagcaaguuaaaaua |
| | aggcuaguccguuaucaacuugaaaaaguggcaccga |
| | gucggugcu₍₁₋₈₎ |

[0126] [000124] A single-molecule guide RNA (sgRNA) in a Type V system can comprise, in the 5′ to 3′ direction, a minimum CRISPR repeat sequence and a spacer sequence.

[0127] By way of illustration, guide RNAs used in the CRISPR/Cas9 or CRISPR/Cpf1 system, or other smaller RNAs can be readily synthesized by chemical means, as illustrated below and described in the art. While chemical synthetic procedures are continually expanding, purifications of such RNAs by procedures such as high performance liquid chromatography (HPLC, which avoids the use of gels such as PAGE) tends to become more challenging as polynucleotide lengths increase significantly beyond a hundred or so nucleotides. One approach used for generating RNAs of greater length is to produce two or more molecules that are ligated together. Much longer RNAs, such as those encoding a Cas9 or Cpf1 endonuclease, are more readily generated enzymatically. Various types of RNA modifications can be introduced during or after chemical synthesis and/or enzymatic generation of RNAs, e.g., modifications that enhance stability, reduce the likelihood or degree of innate immune response, and/or enhance other attributes, as described in the art.

### Spacer Extension Sequence

[0128] In some examples of genome-targeting nucleic acids, a spacer extension sequence can modify activity, provide stability and/or provide a location for modifications of a genome-targeting nucleic acid. A spacer extension sequence can modify on- or off-target activity or specificity. In some examples, a spacer extension sequence can be provided. The spacer extension sequence can have a length of more than 1, 5, 10, 15, 20, 25, 30, 35, 40, 45, 50, 60, 70, 80, 90, 100, 120, 140, 160, 180, 200, 220, 240, 260, 280, 300, 320, 340, 360, 380, 400, 1000, 2000, 3000, 4000, 5000, 6000, or 7000 or more nucleotides. The spacer extension sequence can have a length of less than 1, 5, 10, 15, 20, 25, 30, 35, 40, 45, 50, 60, 70, 80, 90, 100, 120, 140, 160, 180, 200, 220, 240, 260, 280, 300, 320, 340, 360, 380, 400, 1000, 2000, 3000, 4000, 5000, 6000, 7000 or more nucleotides. The spacer extension sequence can be less than 10 nucleotides in length. The spacer extension sequence can be between 10-30 nucleotides in length. The spacer extension sequence can be between 30-70 nucleotides in length.

[0129] The spacer extension sequence can comprise another moiety (e.g., a stability control sequence, an endoribonuclease binding sequence, a ribozyme). The moiety can decrease or increase the stability of a nucleic acid targeting nucleic acid. The moiety can be a transcriptional terminator segment (i.e., a transcription termination sequence). The moiety can function in a eukaryotic cell. The moiety can function in a prokaryotic cell. The moiety can function in both eukaryotic and prokaryotic cells. Non-limiting examples of suitable moieties include: a 5′ cap (e.g., a 7-methylguanylate cap (m7 G)), a riboswitch sequence (e.g., to allow for regulated stability and/or regulated accessibility by proteins and protein complexes), a sequence that forms a dsRNA duplex (i.e., a hairpin), a sequence that targets the RNA to a subcellular location (e.g., nucleus, mitochondria, chloroplasts, and the like), a modification or sequence that provides for tracking (e.g., direct conjugation to a fluorescent molecule, conjugation to a moiety that facilitates fluorescent detection, a sequence that allows for fluorescent detection, etc.), and/or a modification or sequence that provides a binding site for proteins (e.g., proteins that act on DNA, including transcriptional activators, transcriptional repressors, DNA methyltransferases, DNA demethylases, histone acetyltransferases, histone deacetylases, and the like).

### Spacer Sequence

[0130] The spacer sequence hybridizes to a sequence in a target nucleic acid of interest. The spacer of a genome-targeting nucleic acid can interact with a target nucleic acid in a sequence-specific manner via hybridization (i.e., base pairing). The nucleotide sequence of the spacer can vary depending on the sequence of the target nucleic acid of interest.

[0131] In a CRISPR/Cas system herein, the spacer sequence can be designed to hybridize to a target nucleic acid that is located 5′ of a PAM of the Cas9 enzyme used in the system. The spacer may perfectly match the target sequence or may have mismatches. Each Cas9 enzyme has a particular PAM sequence that it recognizes in a target DNA. For example, S. pyogenes recognizes in a target nucleic acid a PAM that comprises the sequence 5′-NRG-3′, where R comprises either A or G, where N is any nucleotide and N is immediately 3′ of the target nucleic acid sequence targeted by the spacer sequence.

[0132] The target nucleic acid sequence can comprise 20 nucleotides. The target nucleic acid can comprise less than 20 nucleotides. The target nucleic acid can comprise more than 20 nucleotides. The target nucleic acid can comprise at least: 5, 10, 15, 16, 17, 18, 19, 20, 21, 22, 23, 24, 25, 30 or more nucleotides. The target nucleic acid can comprise at most: 5, 10, 15, 16, 17, 18, 19, 20, 21, 22, 23, 24, 25, 30 or more nucleotides. The target nucleic acid sequence can comprise 20 bases immediately 5′ of the first nucleotide of the PAM. For example, in a sequence comprising 5′-NNNNNNNNNNNNNNNNNNNNNRG-3′ (SEQ ID NO: 415,474), the target nucleic acid can comprise the sequence that corresponds to the Ns, wherein N is any nucleotide, and the underlined NRG sequence is the S. pyogenes PAM. This target nucleic acid sequence is often referred to as the PAM strand, and the complementary nucleic acid sequence is often referred to the non-PAM strand. One of skill in the art would recognize that the spacer sequence hybridizes to the non-PAM strand of the target nucleic acid (FIGS. 1A and 1B).

[0133] The spacer sequence that hybridizes to the target nucleic acid can have a length of at least about 6 nucleotides (nt). The spacer sequence can be at least about 6 nt, at least about 10 nt, at least about 15 nt, at least about 18 nt, at least about 19 nt, at least about 20 nt, at least about 25 nt, at least about 30 nt, at least about 35 nt or at least about 40 nt, from about 6 nt to about 80 nt, from about 6 nt to about 50 nt, from about 6 nt to about 45 nt, from about 6 nt to about 40 nt, from about 6 nt to about 35 nt, from about 6 nt to about 30 nt, from about 6 nt to about 25 nt, from about 6 nt to about 20 nt, from about 6 nt to about 19 nt, from about 10 nt to about 50 nt, from about 10 nt to about 45 nt, from about 10 nt to about 40 nt, from about 10 nt to about 35 nt, from about 10 nt to about 30 nt, from about 10 nt to about 25 nt, from about 10 nt to about 20 nt, from about 10 nt to about 19 nt, from about 19 nt to about 25 nt, from about 19 nt to about 30 nt, from about 19 nt to about 35 nt, from about 19 nt to about 40 nt, from about 19 nt to about 45 nt, from about 19 nt to about 50 nt, from about 19 nt to about 60 nt, from about 20 nt to about 25 nt, from about 20 nt to about 30 nt, from about 20 nt to about 35 nt, from about 20 nt to about 40 nt, from about 20 nt to about 45 nt, from about 20 nt to about 50 nt, or from about 20 nt to about 60 nt. In some examples, the spacer sequence can comprise 20 nucleotides. In some examples, the spacer sequence can comprise 19 nucleotides. In some examples, the spacer sequence can comprise 18 nucleotides. In some examples, the spacer sequence can comprise 21 nucleotides. In some examples, the spacer sequence can comprise 22 nucleotides.

[0134] In some examples, the percent complementarity between the spacer sequence and the target nucleic acid is at least about 30%, at least about 40%, at least about 50%, at least about 60%, at least about 65%, at least about 70%, at least about 75%, at least about 80%, at least about 85%, at least about 90%, at least about 95%, at least about 97%, at least about 98%, at least about 99%, or 100%. In some examples, the percent complementarity between the spacer sequence and the target nucleic acid is at most about 30%, at most about 40%, at most about 50%, at most about 60%, at most about 65%, at most about 70%, at most about 75%, at most about 80%, at most about 85%, at most about 90%, at most about 95%, at most about 97%, at most about 98%, at most about 99%, or 100%. In some examples, the percent complementarity between the spacer sequence and the target nucleic acid is 100% over the six contiguous 5′-most nucleotides of the target sequence of the complementary strand of the target nucleic acid. The percent complementarity between the spacer sequence and the target nucleic acid can be at least 60% over about 20 contiguous nucleotides. The length of the spacer sequence and the target nucleic acid can differ by 1 to 6 nucleotides, which may be thought of as a bulge or bulges.

[0135] The spacer sequence can be designed or chosen using a computer program. The computer program can use variables, such as predicted melting temperature, secondary structure formation, predicted annealing temperature, sequence identity, genomic context, chromatin accessibility, % GC, frequency of genomic occurrence (e.g., of sequences that are identical or are similar but vary in one or more spots as a result of mismatch, insertion or deletion), methylation status, presence of SNPs, and the like.

### Minimum CRISPR Repeat Sequence

[0136] In some aspects, a minimum CRISPR repeat sequence is a sequence with at least about 30%, about 40%, about 50%, about 60%, about 65%, about 70%, about 75%, about 80%, about 85%, about 90%, about 95%, or 100% sequence identity to a reference CRISPR repeat sequence (e.g., crRNA from S. pyogenes).

[0137] In some aspects, a minimum CRISPR repeat sequence comprises nucleotides that can hybridize to a minimum tracrRNA sequence in a cell. The minimum CRISPR repeat sequence and a minimum tracrRNA sequence can form a duplex, i.e. a base-paired double-stranded structure. Together, the minimum CRISPR repeat sequence and the minimum tracrRNA sequence can bind to the site-directed polypeptide. At least a part of the minimum CRISPR repeat sequence can hybridize to the minimum tracrRNA sequence. At least a part of the minimum CRISPR repeat sequence can comprise at least about 30%, about 40%, about 50%, about 60%, about 65%, about 70%, about 75%, about 80%, about 85%, about 90%, about 95%, or 100% complementary to the minimum tracrRNA sequence. In some aspects, at least a part of the minimum CRISPR repeat sequence can comprise at most about 30%, about 40%, about 50%, about 60%, about 65%, about 70%, about 75%, about 80%, about 85%, about 90%, about 95%, or 100% complementary to the minimum tracrRNA sequence.

[0138] The minimum CRISPR repeat sequence can have a length from about 7 nucleotides to about 100 nucleotides. For example, the length of the minimum CRISPR repeat sequence is from about 7 nucleotides (nt) to about 50 nt, from about 7 nt to about 40 nt, from about 7 nt to about 30 nt, from about 7 nt to about 25 nt, from about 7 nt to about 20 nt, from about 7 nt to about 15 nt, from about 8 nt to about 40 nt, from about 8 nt to about 30 nt, from about 8 nt to about 25 nt, from about 8 nt to about 20 nt, from about 8 nt to about 15 nt, from about 15 nt to about 100 nt, from about 15 nt to about 80 nt, from about 15 nt to about 50 nt, from about 15 nt to about 40 nt, from about 15 nt to about 30 nt, or from about 15 nt to about 25 nt. In some aspects, the minimum CRISPR repeat sequence is approximately 9 nucleotides in length. In some aspects, the minimum CRISPR repeat sequence is approximately 12 nucleotides in length.

[0139] The minimum CRISPR repeat sequence can be at least about 60% identical to a reference minimum CRISPR repeat sequence (e.g., wild-type crRNA from S. pyogenes) over a stretch of at least 6, 7, or 8 contiguous nucleotides. For example, the minimum CRISPR repeat sequence can be at least about 65% identical, at least about 70% identical, at least about 75% identical, at least about 80% identical, at least about 85% identical, at least about 90% identical, at least about 95% identical, at least about 98% identical, at least about 99% identical or 100% identical to a reference minimum CRISPR repeat sequence over a stretch of at least 6, 7, or 8 contiguous nucleotides.

Minimum tracrRNA Sequence

[0140] A minimum tracrRNA sequence can be a sequence with at least about 30%, about 40%, about 50%, about 60%, about 65%, about 70%, about 75%, about 80%, about 85%, about 90%, about 95%, or 100% sequence identity to a reference tracrRNA sequence (e.g., wild type tracrRNA from S. pyogenes).

[0141] A minimum tracrRNA sequence can comprise nucleotides that hybridize to a minimum CRISPR repeat sequence in a cell. A minimum tracrRNA sequence and a minimum CRISPR repeat sequence form a duplex, i.e. a base-paired double-stranded structure. Together, the minimum tracrRNA sequence and the minimum CRISPR repeat can bind to a site-directed polypeptide. At least a part of the minimum tracrRNA sequence can hybridize to the minimum CRISPR repeat sequence. The minimum tracrRNA sequence can be at least about 30%, about 40%, about 50%, about 60%, about 65%, about 70%, about 75%, about 80%, about 85%, about 90%, about 95%, or 100% complementary to the minimum CRISPR repeat sequence.

[0142] The minimum tracrRNA sequence can have a length from about 7 nucleotides to about 100 nucleotides. For example, the minimum tracrRNA sequence can be from about 7 nucleotides (nt) to about 50 nt, from about 7 nt to about 40 nt, from about 7 nt to about 30 nt, from about 7 nt to about 25 nt, from about 7 nt to about 20 nt, from about 7 nt to about 15 nt, from about 8 nt to about 40 nt, from about 8 nt to about 30 nt, from about 8 nt to about 25 nt, from about 8 nt to about 20 nt, from about 8 nt to about 15 nt, from about 15 nt to about 100 nt, from about 15 nt to about 80 nt, from about 15 nt to about 50 nt, from about 15 nt to about 40 nt, from about 15 nt to about 30 nt or from about 15 nt to about 25 nt long. The minimum tracrRNA sequence can be approximately 9 nucleotides in length. The minimum tracrRNA sequence can be approximately 12 nucleotides. The minimum tracrRNA can consist of tracrRNA nt 23-48 described in Jinek et al., supra.

[0143] The minimum tracrRNA sequence can be at least about 60% identical to a reference minimum tracrRNA (e.g., wild type, tracrRNA from S. pyogenes) sequence over a stretch of at least 6, 7, or 8 contiguous nucleotides. For example, the minimum tracrRNA sequence can be at least about 65% identical, about 70% identical, about 75% identical, about 80% identical, about 85% identical, about 90% identical, about 95% identical, about 98% identical, about 99% identical or 100% identical to a reference minimum tracrRNA sequence over a stretch of at least 6, 7, or 8 contiguous nucleotides.

[0144] The duplex between the minimum CRISPR RNA and the minimum tracrRNA can comprise a double helix. The duplex between the minimum CRISPR RNA and the minimum tracrRNA can comprise at least about 1, 2, 3, 4, 5, 6, 7, 8, 9, or 10 or more nucleotides. The duplex between the minimum CRISPR RNA and the minimum tracrRNA can comprise at most about 1, 2, 3, 4, 5, 6, 7, 8, 9, or 10 or more nucleotides.

[0145] The duplex can comprise a mismatch (i.e., the two strands of the duplex are not 100% complementary). The duplex can comprise at least about 1, 2, 3, 4, or 5 or mismatches. The duplex can comprise at most about 1, 2, 3, 4, or 5 or mismatches. The duplex can comprise no more than 2 mismatches.

### Bulges

[0146] In some cases, there can be a “bulge” in the duplex between the minimum CRISPR RNA and the minimum tracrRNA. A bulge is an unpaired region of nucleotides within the duplex. A bulge can contribute to the binding of the duplex to the site-directed polypeptide. The bulge can comprise, on one side of the duplex, an unpaired 5′-XXXY-3′ where X is any purine and Y comprises a nucleotide that can form a wobble pair with a nucleotide on the opposite strand, and an unpaired nucleotide region on the other side of the duplex. The number of unpaired nucleotides on the two sides of the duplex can be different.

[0147] In one example, the bulge can comprise an unpaired purine (e.g., adenine) on the minimum CRISPR repeat strand of the bulge. In some examples, the bulge can comprise an unpaired 5′-AAGY-3′ of the minimum tracrRNA sequence strand of the bulge, where Y comprises a nucleotide that can form a wobble pairing with a nucleotide on the minimum CRISPR repeat strand.

[0148] A bulge on the minimum CRISPR repeat side of the duplex can comprise at least 1, 2, 3, 4, or 5 or more unpaired nucleotides. A bulge on the minimum CRISPR repeat side of the duplex can comprise at most 1, 2, 3, 4, or 5 or more unpaired nucleotides. A bulge on the minimum CRISPR repeat side of the duplex can comprise 1 unpaired nucleotide.

[0149] A bulge on the minimum tracrRNA sequence side of the duplex can comprise at least 1, 2, 3, 4, 5, 6, 7, 8, 9, or 10 or more unpaired nucleotides. A bulge on the minimum tracrRNA sequence side of the duplex can comprise at most 1, 2, 3, 4, 5, 6, 7, 8, 9, or 10 or more unpaired nucleotides. A bulge on a second side of the duplex (e.g., the minimum tracrRNA sequence side of the duplex) can comprise 4 unpaired nucleotides.

[0150] A bulge can comprise at least one wobble pairing. In some examples, a bulge can comprise at most one wobble pairing. A bulge can comprise at least one purine nucleotide. A bulge can comprise at least 3 purine nucleotides. A bulge sequence can comprise at least 5 purine nucleotides. A bulge sequence can comprise at least one guanine nucleotide. In some examples, a bulge sequence can comprise at least one adenine nucleotide.

### Hairpins

[0151] In various examples, one or more hairpins can be located 3′ to the minimum tracrRNA in the 3′ tracrRNA sequence.

[0152] The hairpin can start at least about 1, 2, 3, 4, 5, 6, 7, 8, 9, 10, 15, or 20 or more nucleotides 3′ from the last paired nucleotide in the minimum CRISPR repeat and minimum tracrRNA sequence duplex. The hairpin can start at most about 1, 2, 3, 4, 5, 6, 7, 8, 9 or 10 or more nucleotides 3′ of the last paired nucleotide in the minimum CRISPR repeat and minimum tracrRNA sequence duplex.

[0153] The hairpin can comprise at least about 1, 2, 3, 4, 5, 6, 7, 8, 9, 10, 15, or 20 or more consecutive nucleotides. The hairpin can comprise at most about 1, 2, 3, 4, 5, 6, 7, 8, 9, 10, 15, or more consecutive nucleotides.

[0154] The hairpin can comprise a CC dinucleotide (i.e., two consecutive cytosine nucleotides).

[0155] The hairpin can comprise duplexed nucleotides (e.g., nucleotides in a hairpin, hybridized together). For example, a hairpin can comprise a CC dinucleotide that is hybridized to a GG dinucleotide in a hairpin duplex of the 3′ tracrRNA sequence. [000154] One or more of the hairpins can interact with guide RNA-interacting regions of a site-directed polypeptide.

[0156] In some examples, there are two or more hairpins, and in other examples there are three or more hairpins.

3′ tracrRNA Sequence

[0157] A 3′ tracrRNA sequence can comprise a sequence with at least about 30%, about 40%, about 50%, about 60%, about 65%, about 70%, about 75%, about 80%, about 85%, about 90%, about 95%, or 100% sequence identity to a reference tracrRNA sequence (e.g., a tracrRNA from S. pyogenes).

[0158] The 3′ tracrRNA sequence can have a length from about 6 nucleotides to about 100 nucleotides. For example, the 3′ tracrRNA sequence can have a length from about 6 nucleotides (nt) to about 50 nt, from about 6 nt to about 40 nt, from about 6 nt to about 30 nt, from about 6 nt to about 25 nt, from about 6 nt to about 20 nt, from about 6 nt to about 15 nt, from about 8 nt to about 40 nt, from about 8 nt to about 30 nt, from about 8 nt to about 25 nt, from about 8 nt to about 20 nt, from about 8 nt to about 15 nt, from about 15 nt to about 100 nt, from about 15 nt to about 80 nt, from about 15 nt to about 50 nt, from about 15 nt to about 40 nt, from about 15 nt to about 30 nt, or from about 15 nt to about 25 nt. The 3′ tracrRNA sequence can have a length of approximately 14 nucleotides.

[0159] The 3′ tracrRNA sequence can be at least about 60% identical to a reference 3′ tracrRNA sequence (e.g., wild type 3′ tracrRNA sequence from S. pyogenes) over a stretch of at least 6, 7, or 8 contiguous nucleotides. For example, the 3′ tracrRNA sequence can be at least about 60% identical, about 65% identical, about 70% identical, about 75% identical, about 80% identical, about 85% identical, about 90% identical, about 95% identical, about 98% identical, about 99% identical, or 100% identical, to a reference 3′ tracrRNA sequence (e.g., wild type 3′ tracrRNA sequence from S. pyogenes) over a stretch of at least 6, 7, or 8 contiguous nucleotides.

[0160] The 3′ tracrRNA sequence can comprise more than one duplexed region (e.g., hairpin, hybridized region). The 3′ tracrRNA sequence can comprise two duplexed regions.

[0161] The 3′ tracrRNA sequence can comprise a stem loop structure. The stem loop structure in the 3′ tracrRNA can comprise at least 1, 2, 3, 4, 5, 6, 7, 8, 9, 10, 15 or 20 or more nucleotides. The stem loop structure in the 3′ tracrRNA can comprise at most 1, 2, 3, 4, 5, 6, 7, 8, 9 or 10 or more nucleotides. The stem loop structure can comprise a functional moiety. For example, the stem loop structure can comprise an aptamer, a ribozyme, a protein-interacting hairpin, a CRISPR array, an intron, or an exon. The stem loop structure can comprise at least about 1, 2, 3, 4, or 5 or more functional moieties. The stem loop structure can comprise at most about 1, 2, 3, 4, or 5 or more functional moieties.

[0162] The hairpin in the 3′ tracrRNA sequence can comprise a P-domain. In some examples, the P-domain can comprise a double-stranded region in the hairpin.

tracrRNA Extension Sequence

[0163] A tracrRNA extension sequence may be provided whether the tracrRNA is in the context of single-molecule guides or double-molecule guides. The tracrRNA extension sequence can have a length from about 1 nucleotide to about 400 nucleotides. The tracrRNA extension sequence can have a length of more than 1, 5, 10, 15, 20, 25, 30, 35, 40, 45, 50, 60, 70, 80, 90, 100, 120, 140, 160, 180, 200, 220, 240, 260, 280, 300, 320, 340, 360, 380, or 400 nucleotides. The tracrRNA extension sequence can have a length from about 20 to about 5000 or more nucleotides. The tracrRNA extension sequence can have a length of more than 1000 nucleotides. The tracrRNA extension sequence can have a length of less than 1, 5, 10, 15, 20, 25, 30, 35, 40, 45, 50, 60, 70, 80, 90, 100, 120, 140, 160, 180, 200, 220, 240, 260, 280, 300, 320, 340, 360, 380, 400 or more nucleotides. The tracrRNA extension sequence can have a length of less than 1000 nucleotides. The tracrRNA extension sequence can comprise less than 10 nucleotides in length. The tracrRNA extension sequence can be 10-30 nucleotides in length. The tracrRNA extension sequence can be 30-70 nucleotides in length.

[0164] The tracrRNA extension sequence can comprise a functional moiety (e.g., a stability control sequence, ribozyme, endoribonuclease binding sequence). The functional moiety can comprise a transcriptional terminator segment (i.e., a transcription termination sequence). The functional moiety can have a total length from about 10 nucleotides (nt) to about 100 nucleotides, from about 10 nt to about 20 nt, from about 20 nt to about 30 nt, from about 30 nt to about 40 nt, from about 40 nt to about 50 nt, from about 50 nt to about 60 nt, from about 60 nt to about 70 nt, from about 70 nt to about 80 nt, from about 80 nt to about 90 nt, or from about 90 nt to about 100 nt, from about 15 nt to about 80 nt, from about 15 nt to about 50 nt, from about 15 nt to about 40 nt, from about 15 nt to about 30 nt, or from about 15 nt to about 25 nt. The functional moiety can function in a eukaryotic cell. The functional moiety can function in a prokaryotic cell. The functional moiety can function in both eukaryotic and prokaryotic cells.

[0165] Non-limiting examples of suitable tracrRNA extension functional moieties include a 3′ poly-adenylated tail, a riboswitch sequence (e.g., to allow for regulated stability and/or regulated accessibility by proteins and protein complexes), a sequence that forms a dsRNA duplex (i.e., a hairpin), a sequence that targets the RNA to a subcellular location (e.g., nucleus, mitochondria, chloroplasts, and the like), a modification or sequence that provides for tracking (e.g., direct conjugation to a fluorescent molecule, conjugation to a moiety that facilitates fluorescent detection, a sequence that allows for fluorescent detection, etc.), and/or a modification or sequence that provides a binding site for proteins (e.g., proteins that act on DNA, including transcriptional activators, transcriptional repressors, DNA methyltransferases, DNA demethylases, histone acetyltransferases, histone deacetylases, and the like). The tracrRNA extension sequence can comprise a primer binding site or a molecular index (e.g., barcode sequence). The tracrRNA extension sequence can comprise one or more affinity tags.

### Single-Molecule Guide Linker Sequence

[0166] The linker sequence of a single-molecule guide nucleic acid can have a length from about 3 nucleotides to about 100 nucleotides. In Jinek et al., supra, for example, a simple 4 nucleotide “tetraloop” (-GAAA-) was used, Science, 337(6096):816-821 (2012). An illustrative linker has a length from about 3 nucleotides (nt) to about 90 nt, from about 3 nt to about 80 nt, from about 3 nt to about 70 nt, from about 3 nt to about 60 nt, from about 3 nt to about 50 nt, from about 3 nt to about 40 nt, from about 3 nt to about 30 nt, from about 3 nt to about 20 nt, from about 3 nt to about 10 nt. For example, the linker can have a length from about 3 nt to about 5 nt, from about 5 nt to about 10 nt, from about 10 nt to about 15 nt, from about 15 nt to about 20 nt, from about 20 nt to about 25 nt, from about 25 nt to about 30 nt, from about 30 nt to about 35 nt, from about 35 nt to about 40 nt, from about 40 nt to about 50 nt, from about 50 nt to about 60 nt, from about 60 nt to about 70 nt, from about 70 nt to about 80 nt, from about 80 nt to about 90 nt, or from about 90 nt to about 100 nt. The linker of a single-molecule guide nucleic acid can be between 4 and 40 nucleotides. The linker can be at least about 100, 500, 1000, 1500, 2000, 2500, 3000, 3500, 4000, 4500, 5000, 5500, 6000, 6500, or 7000 or more nucleotides. The linker can be at most about 100, 500, 1000, 1500, 2000, 2500, 3000, 3500, 4000, 4500, 5000, 5500, 6000, 6500, or 7000 or more nucleotides.

[0167] Linkers can comprise any of a variety of sequences, although in some examples the linker will not comprise sequences that have extensive regions of homology with other portions of the guide RNA, which might cause intramolecular binding that could interfere with other functional regions of the guide. In Jinek et al., supra, a simple 4 nucleotide sequence -GAAA- was used, Science, 337(6096):816-821 (2012), but numerous other sequences, including longer sequences can likewise be used.

[0168] The linker sequence can comprise a functional moiety. For example, the linker sequence can comprise one or more features, including an aptamer, a ribozyme, a protein-interacting hairpin, a protein binding site, a CRISPR array, an intron, or an exon. The linker sequence can comprise at least about 1, 2, 3, 4, or 5 or more functional moieties. In some examples, the linker sequence can comprise at most about 1, 2, 3, 4, or 5 or more functional moieties.

### Nucleic Acid Modifications (Chemical and Structural Modifications)

[0169] In some aspects, polynucleotides introduced into cells can comprise one or more modifications that can be used individually or in combination, for example, to enhance activity, stability or specificity, alter delivery, reduce innate immune responses in host cells, or for other enhancements, as further described herein and known in the art.

[0170] In certain examples, modified polynucleotides can be used in the CRISPR/Cas9 or CRISPR/Cpf1 system, in which case the guide RNAs (either single-molecule guides or double-molecule guides) and/or a DNA or an RNA encoding a Cas9 or Cpf1 endonuclease introduced into a cell can be modified, as described and illustrated below. Such modified polynucleotides can be used in the CRISPR/Cas9 or CRISPR/Cpf1 system to edit any one or more genomic loci.

[0171] Using the CRISPR/Cas9 or CRISPR/Cpf1 system for purposes of non-limiting illustrations of such uses, modifications of guide RNAs can be used to enhance the formation or stability of the CRISPR/Cas9 or CRISPR/Cpf1 genome editing complex comprising guide RNAs, which can be single-molecule guides or double-molecule, and a Cas9 or Cpf1 endonuclease. Modifications of guide RNAs can also or alternatively be used to enhance the initiation, stability or kinetics of interactions between the genome editing complex with the target sequence in the genome, which can be used, for example, to enhance on-target activity. Modifications of guide RNAs can also or alternatively be used to enhance specificity, e.g., the relative rates of genome editing at the on-target site as compared to effects at other (off-target) sites.

[0172] Modifications can also or alternatively be used to increase the stability of a guide RNA, e.g., by increasing its resistance to degradation by ribonucleases (RNases) present in a cell, thereby causing its half-life in the cell to be increased. Modifications enhancing guide RNA half-life can be particularly useful in aspects in which a Cas9 or Cpf1 endonuclease is introduced into the cell to be edited via an RNA that needs to be translated in order to generate endonuclease, because increasing the half-life of guide RNAs introduced at the same time as the RNA encoding the endonuclease can be used to increase the time that the guide RNAs and the encoded Cas9 or Cpf1 endonuclease co-exist in the cell.

[0173] Modifications can also or alternatively be used to decrease the likelihood or degree to which RNAs introduced into cells elicit innate immune responses. Such responses, which have been well characterized in the context of RNA interference (RNAi), including small-interfering RNAs (siRNAs), as described below and in the art, tend to be associated with reduced half-life of the RNA and/or the elicitation of cytokines or other factors associated with immune responses.

[0174] One or more types of modifications can also be made to RNAs encoding an endonuclease that are introduced into a cell, including, without limitation, modifications that enhance the stability of the RNA (such as by increasing its degradation by RNases present in the cell), modifications that enhance translation of the resulting product (i.e. the endonuclease), and/or modifications that decrease the likelihood or degree to which the RNAs introduced into cells elicit innate immune responses.

[0175] Combinations of modifications, such as the foregoing and others, can likewise be used. In the case of CRISPR/Cas9 or CRISPR/Cpf1, for example, one or more types of modifications can be made to guide RNAs (including those exemplified above), and/or one or more types of modifications can be made to RNAs encoding Cas endonuclease (including those exemplified above).

[0176] By way of illustration, guide RNAs used in the CRISPR/Cas9 or CRISPR/Cpf1 system, or other smaller RNAs can be readily synthesized by chemical means, enabling a number of modifications to be readily incorporated, as illustrated below and described in the art. While chemical synthetic procedures are continually expanding, purifications of such RNAs by procedures such as high-performance liquid chromatography (HPLC, which avoids the use of gels such as PAGE) tends to become more challenging as polynucleotide lengths increase significantly beyond a hundred or so nucleotides. One approach that can be used for generating chemically-modified RNAs of greater length is to produce two or more molecules that are ligated together. Much longer RNAs, such as those encoding a Cas9 endonuclease, are more readily generated enzymatically. While fewer types of modifications are available for use in enzymatically produced RNAs, there are still modifications that can be used to, e.g., enhance stability, reduce the likelihood or degree of innate immune response, and/or enhance other attributes, as described further below and in the art; and new types of modifications are regularly being developed.

[0177] By way of illustration of various types of modifications, especially those used frequently with smaller chemically synthesized RNAs, modifications can comprise one or more nucleotides modified at the 2′ position of the sugar, in some aspects a 2′-O-alkyl, 2′-O-alkyl-O-alkyl, or 2′-fluoro-modified nucleotide. In some examples, RNA modifications include 2′-fluoro, 2′-amino or 2′-O-methyl modifications on the ribose of pyrimidines, abasic residues, or an inverted base at the 3′ end of the RNA. Such modifications are routinely incorporated into oligonucleotides and these oligonucleotides have been shown to have a higher Tm (i.e., higher target binding affinity) than 2′-deoxyoligonucleotides against a given target.

[0178] A number of nucleotide and nucleoside modifications have been shown to make the oligonucleotide into which they are incorporated more resistant to nuclease digestion than the native oligonucleotide; these modified oligos survive intact for a longer time than unmodified oligonucleotides. Specific examples of modified oligonucleotides include those comprising modified backbones, for example, phosphorothioates, phosphotriesters, methyl phosphonates, short chain alkyl or cycloalkyl intersugar linkages or short chain heteroatomic or heterocyclic intersugar linkages. Some oligonucleotides are oligonucleotides with phosphorothioate backbones and those with heteroatom backbones, particularly CH₂—NH—O—CH₂, CH,˜N(CH₃)˜O˜CH₂ (known as a methylene(methylimino) or MMI backbone), CH₂—O—N (CH₃)—CH₂, CH₂ —N (CH₃)—N (CH₃)—CH₂ and O—N (CH₃)—CH₂—CH₂ backbones, wherein the native phosphodiester backbone is represented as O—P—O—CH,); amide backbones [see De Mesmaeker et al., Ace. Chem. Res., 28:366-374 (1995)]; morpholino backbone structures (see Summerton and Weller, U.S. Pat. No. 5,034,506); peptide nucleic acid (PNA) backbone (wherein the phosphodiester backbone of the oligonucleotide is replaced with a polyamide backbone, the nucleotides being bound directly or indirectly to the aza nitrogen atoms of the polyamide backbone, see Nielsen et al., Science 1991, 254, 1497). Phosphorus-containing linkages include, but are not limited to, phosphorothioates, chiral phosphorothioates, phosphorodithioates, phosphotriesters, aminoalkylphosphotriesters, methyl and other alkyl phosphonates comprising 3′alkylene phosphonates and chiral phosphonates, phosphinates, phosphoramidates comprising 3′-amino phosphoramidate and aminoalkylphosphoramidates, thionophosphoramidates, thionoalkylphosphonates, thionoalkylphosphotriesters, and boranophosphates having normal 3′-5′ linkages, 2′-5′ linked analogs of these, and those having inverted polarity wherein the adjacent pairs of nucleoside units are linked 3′-5′ to 5′-3′ or 2′-5′ to 5′-2; see U.S. Pat. Nos. 3,687,808; 4,469,863; 4,476,301; 5,023,243; 5,177,196; 5,188,897; 5,264,423; 5,276,019; 5,278,302; 5,286,717; 5,321,131; 5,399,676; 5,405,939; 5,453,496; 5,455,233; 5,466,677; 5,476,925; 5,519,126; 5,536,821; 5,541,306; 5,550,111; 5,563,253; 5,571,799; 5,587,361; and 5,625,050.

[0179] Morpholino-based oligomeric compounds are described in Braasch and David Corey, Biochemistry, 41(14): 4503-4510 (2002); Genesis, Volume 30, Issue 3, (2001); Heasman, Dev. Biol., 243: 209-214 (2002); Nasevicius et al., Nat. Genet., 26:216-220 (2000); Lacerra et al., Proc. Natl. Acad. Sci., 97: 9591-9596 (2000); and U.S. Pat. No. 5,034,506, issued Jul. 23, 1991.

[0180] Cyclohexenyl nucleic acid oligonucleotide mimetics are described in Wang et al., J. Am. Chem. Soc., 122: 8595-8602 (2000).

[0181] Modified oligonucleotide backbones that do not include a phosphorus atom therein have backbones that are formed by short chain alkyl or cycloalkyl internucleoside linkages, mixed heteroatom and alkyl or cycloalkyl internucleoside linkages, or one or more short chain heteroatomic or heterocyclic internucleoside linkages. These comprise those having morpholino linkages (formed in part from the sugar portion of a nucleoside); siloxane backbones; sulfide, sulfoxide and sulfone backbones; formacetyl and thioformacetyl backbones; methylene formacetyl and thioformacetyl backbones; alkene containing backbones; sulfamate backbones; methyleneimino and methylenehydrazino backbones; sulfonate and sulfonamide backbones; amide backbones; and others having mixed N, O, S, and CH₂ component parts; see U.S. Pat. Nos. 5,034,506; 5,166,315; 5,185,444; 5,214,134; 5,216,141; 5,235,033; 5,264,562; 5,264,564; 5,405,938; 5,434,257; 5,466,677; 5,470,967; 5,489,677; 5,541,307; 5,561,225; 5,596,086; 5,602,240; 5,610,289; 5,602,240; 5,608,046; 5,610,289; 5,618,704; 5,623,070; 5,663,312; 5,633,360; 5,677,437; and 5,677,439.

[0182] One or more substituted sugar moieties can also be included, e.g., one of the following at the 2′ position: OH, SH, SCH₃, F, OCN, OCH₃ OCH₃, OCH₃ O(CH₂)n CH₃, O(CH₂)n NH₂, or O(CH₂)n CH₃, where n is from 1 to about 10; C1 to C10 lower alkyl, alkoxyalkoxy, substituted lower alkyl, alkaryl or aralkyl; Cl; Br; CN; CF₃; OCF₃; O—, S—, or N— alkyl; O—, S—, or N-alkenyl; SOCH₃; SO₂ CH₃; ONO₂; NO₂; N₃; NH₂; heterocycloalkyl; heterocycloalkaryl; aminoalkylamino; polyalkylamino; substituted silyl; an RNA cleaving group; a reporter group; an intercalator; a group for improving the pharmacokinetic properties of an oligonucleotide; or a group for improving the pharmacodynamic properties of an oligonucleotide and other substituents having similar properties. In some aspects, a modification includes 2′-methoxyethoxy (2′-O-CH₂CH₂OCH₃, also known as 2′-O-(2-methoxyethyl)) (Martin et al, Helv. Chim. Acta, 1995, 78, 486). Other modifications include 2′-methoxy (2′—O—CH₃), 2′-propoxy (2′-OCH₂ CH₂CH₃) and 2′-fluoro (2′-F). Similar modifications may also be made at other positions on the oligonucleotide, particularly the 3′ position of the sugar on the 3′ terminal nucleotide and the 5′ position of 5′ terminal nucleotide. Oligonucleotides may also have sugar mimetics, such as cyclobutyls in place of the pentofuranosyl group.

[0183] In some examples, both a sugar and an internucleoside linkage, i.e., the backbone, of the nucleotide units can be replaced with novel groups. The base units can be maintained for hybridization with an appropriate nucleic acid target compound. One such oligomeric compound, an oligonucleotide mimetic that has been shown to have excellent hybridization properties, is referred to as a peptide nucleic acid (PNA). In PNA compounds, the sugar-backbone of an oligonucleotide can be replaced with an amide containing backbone, for example, an aminoethylglycine backbone. The nucleobases can be retained and bound directly or indirectly to aza nitrogen atoms of the amide portion of the backbone. Representative U.S. patents that teach the preparation of PNA compounds comprise, but are not limited to, U.S. Pat. Nos. 5,539,082; 5,714,331; and 5,719,262. Further teaching of PNA compounds can be found in Nielsen et al, Science, 254: 1497-1500 (1991).

[0184] Guide RNAs can also include, additionally or alternatively, nucleobase (often referred to in the art simply as “base”) modifications or substitutions. As used herein, “unmodified” or “natural” nucleobases include adenine (A), guanine (G), thymine (T), cytosine (C), and uracil (U). Modified nucleobases include nucleobases found only infrequently or transiently in natural nucleic acids, e.g., hypoxanthine, 6-methyladenine, 5-Me pyrimidines, particularly 5-methylcytosine (also referred to as 5-methyl-2′ deoxycytosine and often referred to in the art as 5-Me-C), 5-hydroxymethylcytosine (HMC), glycosyl HMC and gentobiosyl HMC, as well as synthetic nucleobases, e.g., 2-aminoadenine, 2-(methylamino) adenine, 2-(imidazolylalkyl)adenine, 2-(aminoalklyamino) adenine or other heterosubstituted alkyladenines, 2-thiouracil, 2-thiothymine, 5-bromouracil, 5-hydroxymethyluracil, 8-azaguanine, 7-deazaguanine, N6 (6-aminohexyl) adenine, and 2,6-diaminopurine. Kornberg, A., DNA Replication, W. H. Freeman & Co., San Francisco, pp. 75-77 (1980); Gebeyehu et al., Nucl. Acids Res. 15:4513 (1997). A “universal” base known in the art, e.g., inosine, can also be included. 5-Me-C substitutions have been shown to increase nucleic acid duplex stability by 0.6-1.2 ° C. (Sanghvi, Y. S., in Crooke, S. T. and Lebleu, B., eds., Antisense Research and Applications, CRC Press, Boca Raton, 1993, pp. 276-278) and are aspects of base substitutions.

[0185] Modified nucleobases can comprise other synthetic and natural nucleobases, such as 5-methylcytosine (5-me-C), 5-hydroxymethyl cytosine, xanthine, hypoxanthine, 2-aminoadenine, 6-methyl and other alkyl derivatives of adenine and guanine, 2-propyl and other alkyl derivatives of adenine and guanine, 2-thiouracil, 2-thiothymine and 2-thiocytosine, 5-halouracil and cytosine, 5-propynyl uracil and cytosine, 6-azo uracil, cytosine and thymine, 5-uracil (pseudo-uracil), 4-thiouracil, 8-halo, 8-amino, 8-thiol, 8-thioalkyl, 8-hydroxyl and other 8-substituted adenines and guanines, 5-halo particularly 5-bromo, 5-trifluoromethyl and other 5-substituted uracils and cytosines, 7-methylquanine and 7-methyladenine, 8-azaguanine and 8-azaadenine, 7-deazaguanine and 7-deazaadenine, and 3-deazaguanine and 3-deazaadenine.

[0186] Further, nucleobases can comprise those disclosed in U.S. Pat. No. 3,687,808, those disclosed in ‘The Concise Encyclopedia of Polymer Science And Engineering’, pages 858-859, Kroschwitz, J. I., ed. John Wiley & Sons, 1990, those disclosed by Englisch et al., Angewandle Chemie, International Edition’, 1991, 30, page 613, and those disclosed by Sanghvi, Y. S., Chapter 15, Antisense Research and Applications’, pages 289-302, Crooke, S. T. and Lebleu, B. ea., CRC Press, 1993. Certain of these nucleobases are particularly useful for increasing the binding affinity of the oligomeric compounds of the present disclosure. These include 5-substituted pyrimidines, 6-azapyrimidines and N-2, N-6 and 0-6 substituted purines, comprising 2-aminopropyladenine, 5-propynyluracil and 5-propynylcytosine. 5-methylcytosine substitutions have been shown to increase nucleic acid duplex stability by 0.6-1.2° C. (Sanghvi, Y. S., Crooke, S. T. and Lebleu, B., eds, ‘Antisense Research and Applications’, CRC Press, Boca Raton, 1993, pp. 276-278) and are aspects of base substitutions, even more particularly when combined with 2′-O-methoxyethyl sugar modifications. Modified nucleobases are described in U.S. Pat. Nos. 3,687,808, as well as 4,845,205; 5,130,302; 5,134,066; 5,175,273; 5,367,066; 5,432,272; 5,457,187; 5,459,255; 5,484,908; 5,502,177; 5,525,711; 5,552,540; 5,587,469; 5,596,091; 5,614,617; 5,681,941; 5,750,692; 5,763,588; 5,830,653; 6,005,096; and U.S. Patent Application Publication 2003/0158403.

[0187] Thus, the term “modified” refers to a non-natural sugar, phosphate, or base that is incorporated into a guide RNA, an endonuclease, or both a guide RNA and an endonuclease. It is not necessary for all positions in a given oligonucleotide to be uniformly modified, and in fact more than one of the aforementioned modifications can be incorporated in a single oligonucleotide, or even in a single nucleoside within an oligonucleotide.

[0188] The guide RNAs and/or mRNA (or DNA) encoding an endonuclease can be chemically linked to one or more moieties or conjugates that enhance the activity, cellular distribution, or cellular uptake of the oligonucleotide. Such moieties comprise, but are not limited to, lipid moieties such as a cholesterol moiety [Letsinger et al., Proc. Natl. Acad. Sci. USA, 86: 6553-6556 (1989)]; cholic acid [Manoharan et al., Bioorg. Med. Chem. Let., 4: 1053-1060 (1994)]; a thioether, e.g., hexyl-S-tritylthiol [Manoharan et al, Ann. N. Y. Acad. Sci., 660: 306-309 (1992) and Manoharan et al., Bioorg. Med. Chem. Let., 3: 2765-2770 (1993)]; a thiocholesterol [Oberhauser et al., Nucl. Acids Res., 20: 533-538 (1992)]; an aliphatic chain, e.g., dodecandiol or undecyl residues [Kabanov et al., FEBS Lett., 259: 327-330 (1990) and Svinarchuk et al., Biochimie, 75: 49-54 (1993)]; a phospholipid, e.g., di-hexadecyl-rac-glycerol or triethylammonium 1 ,2-di-O-hexadecyl-rac-glycero-3-H-phosphonate [Manoharan et al., Tetrahedron Lett., 36: 3651-3654 (1995) and Shea et al., Nucl. Acids Res., 18: 3777-3783 (1990)]; a polyamine or a polyethylene glycol chain [Mancharan et al., Nucleosides & Nucleotides, 14: 969-973 (1995)]; adamantane acetic acid [Manoharan et al., Tetrahedron Lett., 36: 3651-3654 (1995)]; a palmityl moiety [(Mishra et al., Biochim. Biophys. Acta, 1264: 229-237 (1995)]; or an octadecylamine or hexylamino-carbonyl-t oxycholesterol moiety [Crooke et al., J. Pharmacol. Exp. Ther., 277: 923-937 (1996)]. See also U.S. Pat. Nos. 4,828,979; 4,948,882; 5,218,105; 5,525,465; 5,541,313; 5,545,730; 5,552,538; 5,578,717; 5,580,731; 5,591,584; 5,109,124; 5,118,802; 5,138,045; 5,414,077; 5,486,603; 5,512,439; 5,578,718; 5,608,046; 4,587,044; 4,605,735; 4,667,025; 4,762,779; 4,789,737; 4,824,941; 4,835,263; 4,876,335; 4,904,582; 4,958,013; 5,082,830; 5,112,963; 5,214,136; 5,082,830; 5,112,963; 5,214,136; 5,245,022; 5,254,469; 5,258,506; 5,262,536; 5,272,250; 5,292,873; 5,317,098; 5,371,241; 5,391,723; 5,416,203; 5,451,463; 5,510,475; 5,512,667; 5,514,785; 5,565,552; 5,567,810; 5,574,142; 5,585,481; 5,587,371; 5,595,726; 5,597,696; 5,599,923; 5,599, 928 and 5,688,941.

[0189] Sugars and other moieties can be used to target proteins and complexes comprising nucleotides, such as cationic polysomes and liposomes, to particular sites. For example, hepatic cell directed transfer can be mediated via asialoglycoprotein receptors (ASGPRs); see, e.g., Hu, et al., Protein Pept Lett. 21(10):1025-30 (2014). Other systems known in the art and regularly developed can be used to target biomolecules of use in the present case and/or complexes thereof to particular target cells of interest.

[0190] These targeting moieties or conjugates can include conjugate groups covalently bound to functional groups, such as primary or secondary hydroxyl groups. Conjugate groups of the present disclosure include intercalators, reporter molecules, polyamines, polyamides, polyethylene glycols, polyethers, groups that enhance the pharmacodynamic properties of oligomers, and groups that enhance the pharmacokinetic properties of oligomers. Typical conjugate groups include cholesterols, lipids, phospholipids, biotin, phenazine, folate, phenanthridine, anthraquinone, acridine, fluoresceins, rhodamines, coumarins, and dyes. Groups that enhance the pharmacodynamic properties, in the context of this present disclosure, include groups that improve uptake, enhance resistance to degradation, and/or strengthen sequence-specific hybridization with the target nucleic acid. Groups that enhance the pharmacokinetic properties, in the context of this present disclosure, include groups that improve uptake, distribution, metabolism or excretion of the compounds of the present disclosure. Representative conjugate groups are disclosed in International Patent Application No. PCT/US92/09196, filed Oct. 23, 1992 (published as WO1993007883), and U.S. Pat. No. 6,287,860. Conjugate moieties include, but are not limited to, lipid moieties such as a cholesterol moiety, cholic acid, a thioether, e.g., hexyl-5-tritylthiol, a thiocholesterol, an aliphatic chain, e.g., dodecandiol or undecyl residues, a phospholipid, e.g., di-hexadecyl-rac-glycerol or triethylammonium 1,2-di-O-hexadecyl-rac-glycero-3-H-phosphonate, a polyamine or a polyethylene glycol chain, or adamantane acetic acid, a palmityl moiety, or an octadecylamine or hexylamino-carbonyl-oxy cholesterol moiety. See, e.g., U.S. Pat. Nos. 4,828,979; 4,948,882; 5,218,105; 5,525,465; 5,541,313; 5,545,730; 5,552,538; 5,578,717, 5,580,731; 5,591,584; 5,109,124; 5,118,802; 5,138,045; 5,414,077; 5,486,603; 5,512,439; 5,578,718; 5,608,046; 4,587,044; 4,605,735; 4,667,025; 4,762,779; 4,789,737; 4,824,941; 4,835,263; 4,876,335; 4,904,582; 4,958,013; 5,082,830; 5,112,963; 5,214,136; 5,082,830; 5,112,963; 5,214,136; 5,245,022; 5,254,469; 5,258,506; 5,262,536; 5,272,250; 5,292,873; 5,317,098; 5,371,241; 5,391,723; 5,416,203, 5,451,463; 5,510,475; 5,512,667; 5,514,785; 5,565,552; 5,567,810; 5,574,142; 5,585,481; 5,587,371; 5,595,726; 5,597,696; 5,599,923; 5,599,928 and 5,688,941.

[0191] Longer polynucleotides that are less amenable to chemical synthesis and are typically produced by enzymatic synthesis can also be modified by various means. Such modifications can include, for example, the introduction of certain nucleotide analogs, the incorporation of particular sequences or other moieties at the 5′ or 3′ ends of molecules, and other modifications. By way of illustration, the mRNA encoding Cas9 is approximately 4 kb in length and can be synthesized by in vitro transcription. Modifications to the mRNA can be applied to, e.g., increase its translation or stability (such as by increasing its resistance to degradation with a cell), or to reduce the tendency of the RNA to elicit an innate immune response that is often observed in cells following introduction of exogenous RNAs, particularly longer RNAs such as that encoding Cas9.

[0192] Numerous such modifications have been described in the art, such as polyA tails, 5′ cap analogs (e.g., Anti Reverse Cap Analog (ARCA) or m7G(5′)ppp(5′)G (mCAP)), modified 5′ or 3′ untranslated regions (UTRs), use of modified bases (such as Pseudo-UTP, 2-Thio-UTP, 5-Methylcytidine-5′-Triphosphate (5-Methyl-CTP) or N6-Methyl-ATP), or treatment with phosphatase to remove 5′ terminal phosphates. These and other modifications are known in the art, and new modifications of RNAs are regularly being developed.

[0193] There are numerous commercial suppliers of modified RNAs, including for example, TriLink Biotech, AxoLabs, Bio-Synthesis Inc., Dharmacon and many others. As described by TriLink, for example, 5-Methyl-CTP can be used to impart desirable characteristics, such as increased nuclease stability, increased translation or reduced interaction of innate immune receptors with in vitro transcribed RNA. 5-Methylcytidine-5′-Triphosphate (5-Methyl-CTP), N6-Methyl-ATP, as well as Pseudo-UTP and 2-Thio-UTP, have also been shown to reduce innate immune stimulation in culture and in vivo while enhancing translation, as illustrated in publications by Kormann et al. and Warren et al. referred to below.

[0194] It has been shown that chemically modified mRNA delivered in vivo can be used to achieve improved therapeutic effects; see, e.g., Kormann et al., Nature Biotechnology 29, 154-157 (2011). Such modifications can be used, for example, to increase the stability of the RNA molecule and/or reduce its immunogenicity. Using chemical modifications such as Pseudo-U, N6-Methyl-A, 2-Thio-U and 5-Methyl-C, it was found that substituting just one quarter of the uridine and cytidine residues with 2-Thio-U and 5-Methyl-C respectively resulted in a significant decrease in toll-like receptor (TLR) mediated recognition of the mRNA in mice. By reducing the activation of the innate immune system, these modifications can be used to effectively increase the stability and longevity of the mRNA in vivo; see, e.g., Kormann et al., supra.

[0195] It has also been shown that repeated administration of synthetic messenger RNAs incorporating modifications designed to bypass innate anti-viral responses can reprogram differentiated human cells to pluripotency. See, e.g., Warren, et al., Cell Stem Cell, 7(5):618-30 (2010). Such modified mRNAs that act as primary reprogramming proteins can be an efficient means of reprogramming multiple human cell types. Such cells are referred to as induced pluripotency stem cells (iPSCs), and it was found that enzymatically synthesized RNA incorporating 5-Methyl-CTP, Pseudo-UTP and an Anti Reverse Cap Analog (ARCA) could be used to effectively evade the cell's antiviral response; see, e.g., Warren et al., supra.

[0196] Other modifications of polynucleotides described in the art include, for example, the use of polyA tails, the addition of 5′ cap analogs (such as m7G(5′)ppp(5′)G (mCAP)), modifications of 5′ or 3′ untranslated regions (UTRs), or treatment with phosphatase to remove 5′ terminal phosphates—and new approaches are regularly being developed.

[0197] A number of compositions and techniques applicable to the generation of modified RNAs for use herein have been developed in connection with the modification of RNA interference (RNAi), including small-interfering RNAs (siRNAs). siRNAs present particular challenges in vivo because their effects on gene silencing via mRNA interference are generally transient, which can require repeat administration. In addition, siRNAs are double-stranded RNAs (dsRNA) and mammalian cells have immune responses that have evolved to detect and neutralize dsRNA, which is often a by-product of viral infection. Thus, there are mammalian enzymes such as PKR (dsRNA-responsive kinase), and potentially retinoic acid-inducible gene I (RIG-I), that can mediate cellular responses to dsRNA, as well as Toll-like receptors (such as TLR3, TLR7 and TLR8) that can trigger the induction of cytokines in response to such molecules; see, e.g., the reviews by Angart et al., Pharmaceuticals (Basel) 6(4): 440-468 (2013); Kanasty et al., Molecular Therapy 20(3): 513-524 (2012); Burnett et al., Biotechnol J. 6(9):1130-46 (2011); Judge and MacLachlan, Hum Gene Ther 19(2):111-24 (2008); and references cited therein.

[0198] A large variety of modifications have been developed and applied to enhance RNA stability, reduce innate immune responses, and/or achieve other benefits that can be useful in connection with the introduction of polynucleotides into human cells, as described herein; see, e.g., the reviews by Whitehead K A et al., Annual Review of Chemical and Biomolecular Engineering, 2: 77-96 (2011); Gaglione and Messere, Mini Rev Med Chem, 10(7):578-95 (2010); Chernolovskaya et al, Curr Opin Mol Ther., 12(2):158-67 (2010); Deleavey et al., Curr Protoc Nucleic Acid Chem Chapter 16:Unit 16.3 (2009); Behlke, Oligonucleotides 18(4):305-19 (2008); Fucini et al., Nucleic Acid Ther 22(3): 205-210 (2012); Bremsen et al., Front Genet 3:154 (2012).

[0199] As noted above, there are a number of commercial suppliers of modified RNAs, many of which have specialized in modifications designed to improve the effectiveness of siRNAs. A variety of approaches are offered based on various findings reported in the literature. For example, Dharmacon notes that replacement of a non-bridging oxygen with sulfur (phosphorothioate, PS) has been extensively used to improve nuclease resistance of siRNAs, as reported by Kole, Nature Reviews Drug Discovery 11:125-140 (2012). Modifications of the 2′-position of the ribose have been reported to improve nuclease resistance of the internucleotide phosphate bond while increasing duplex stability (Tm), which has also been shown to provide protection from immune activation. A combination of moderate PS backbone modifications with small, well-tolerated 2′-substitutions (2′-O-Methyl, 2′-Fluoro, 2′-Hydro) have been associated with highly stable siRNAs for applications in vivo, as reported by Soutschek et al. Nature 432:173-178 (2004); and 2′-O-Methyl modifications have been reported to be effective in improving stability as reported by Volkov, Oligonucleotides 19:191-202 (2009). With respect to decreasing the induction of innate immune responses, modifying specific sequences with 2′-O-Methyl, 2′-Fluoro, 2′-Hydro have been reported to reduce TLR7/TLR8 interaction while generally preserving silencing activity; see, e.g., Judge et al., Mol. Ther. 13:494-505 (2006); and Cekaite et al., J. Mol. Biol. 365:90-108 (2007). Additional modifications, such as 2-thiouracil, pseudouracil, 5-methylcytosine, 5-methyluracil, and N6-methyladenosine have also been shown to minimize the immune effects mediated by TLR3, TLR7, and TLR8; see, e.g., Kariko, K. et al., Immunity 23:165-175 (2005).

[0200] As is also known in the art, and commercially available, a number of conjugates can be applied to polynucleotides, such as RNAs, for use herein that can enhance their delivery and/or uptake by cells, including for example, cholesterol, tocopherol and folic acid, lipids, peptides, polymers, linkers and aptamers; see, e.g., the review by Winkler, Ther. Deliv. 4:791-809 (2013), and references cited therein.

### Codon-Optimization

[0201] A polynucleotide encoding a site-directed polypeptide can be codon-optimized according to methods standard in the art for expression in the cell containing the target DNA of interest. For example, if the intended target nucleic acid is in a human cell, a human codon-optimized polynucleotide encoding Cas9 is contemplated for use for producing the Cas9 polypeptide.

### Complexes of a Genome-Targeting Nucleic Acid and a Site-Directed Polypeptide

[0202] A genome-targeting nucleic acid interacts with a site-directed polypeptide (e.g., a nucleic acid-guided nuclease such as Cas9), thereby forming a complex. The genome-targeting nucleic acid guides the site-directed polypeptide to a target nucleic acid. Ribonucleoprotein complexes (RNPs)

[0203] The site-directed polypeptide and genome-targeting nucleic acid can each be administered separately to a cell or a patient. On the other hand, the site-directed polypeptide can be pre-complexed with one or more guide RNAs, or one or more crRNA together with a tracrRNA. The pre-complexed material can then be administered to a cell or a patient. Such pre-complexed material is known as a ribonucleoprotein particle (RNP). The site-directed polypeptide in the RNP can be, for example, a Cas9 endonuclease or a Cpf1 endonuclease. The site-directed polypeptide can be flanked at the N-terminus, the C-terminus, or both the N-terminus and C-terminus by one or more nuclear localization signals (NLSs). For example, a Cas9 endonuclease can be flanked by two NLSs, one NLS located at the N-terminus and the second NLS located at the C-terminus. The NLS can be any NLS known in the art, such as a SV40 NLS. The weight ratio of genome-targeting nucleic acid to site-directed polypeptide in the RNP can be 1:1. For example, the weight ratio of sgRNA to Cas9 endonuclease in the RNP can be 1:1.

### Nucleic Acids Encoding System Components

[0204] The present disclosure provides a nucleic acid comprising a nucleotide sequence encoding a genome-targeting nucleic acid of the disclosure, a site-directed polypeptide of the disclosure, and/or any nucleic acid or proteinaceous molecule necessary to carry out the aspects of the methods of the disclosure.

[0205] The nucleic acid encoding a genome-targeting nucleic acid of the disclosure, a site-directed polypeptide of the disclosure, and/or any nucleic acid or proteinaceous molecule necessary to carry out the aspects of the methods of the disclosure can comprise a vector (e.g., a recombinant expression vector).

[0206] The term “vector” refers to a nucleic acid molecule capable of transporting another nucleic acid to which it has been linked. One type of vector is a “plasmid”, which refers to a circular double-stranded DNA loop into which additional nucleic acid segments can be ligated. Another type of vector is a viral vector, wherein additional nucleic acid segments can be ligated into the viral genome. Certain vectors are capable of autonomous replication in a host cell into which they are introduced (e.g., bacterial vectors having a bacterial origin of replication and episomal mammalian vectors). Other vectors (e.g., non-episomal mammalian vectors) are integrated into the genome of a host cell upon introduction into the host cell, and thereby are replicated along with the host genome.

[0207] In some examples, vectors can be capable of directing the expression of nucleic acids to which they are operatively linked. Such vectors are referred to herein as “recombinant expression vectors”, or more simply “expression vectors”, which serve equivalent functions.

[0208] The term “operably linked” means that the nucleotide sequence of interest is linked to regulatory sequence(s) in a manner that allows for expression of the nucleotide sequence. The term “regulatory sequence” is intended to include, for example, promoters, enhancers and other expression control elements (e.g., polyadenylation signals). Such regulatory sequences are well known in the art and are described, for example, in Goeddel; Gene Expression Technology: Methods in Enzymology 185, Academic Press, San Diego, Calif. (1990). Regulatory sequences include those that direct constitutive expression of a nucleotide sequence in many types of host cells, and those that direct expression of the nucleotide sequence only in certain host cells (e.g., tissue-specific regulatory sequences). It will be appreciated by those skilled in the art that the design of the expression vector can depend on such factors as the choice of the target cell, the level of expression desired, and the like.

[0209] Expression vectors contemplated include, but are not limited to, viral vectors based on vaccinia virus, poliovirus, adenovirus, adeno-associated virus, SV40, herpes simplex virus, human immunodeficiency virus, retrovirus (e.g., Murine Leukemia Virus, spleen necrosis virus, and vectors derived from retroviruses such as Rous Sarcoma Virus, Harvey Sarcoma Virus, avian leukosis virus, a lentivirus, human immunodeficiency virus, myeloproliferative sarcoma virus, and mammary tumor virus) and other recombinant vectors. Other vectors contemplated for eukaryotic target cells include, but are not limited to, the vectors pXT1, pSG5, pSVK3, pBPV, pMSG, and pSVLSV40 (Pharmacia). Other vectors can be used so long as they are compatible with the host cell.

[0210] In some examples, a vector can comprise one or more transcription and/or translation control elements. Depending on the host/vector system utilized, any of a number of suitable transcription and translation control elements, including constitutive and inducible promoters, transcription enhancer elements, transcription terminators, etc. can be used in the expression vector. The vector can be a self-inactivating vector that either inactivates the viral sequences or the components of the CRISPR machinery or other elements.

[0211] Non-limiting examples of suitable eukaryotic promoters (i.e., promoters functional in a eukaryotic cell) include those from cytomegalovirus (CMV) immediate early, herpes simplex virus (HSV) thymidine kinase, early and late SV40, long terminal repeats (LTRs) from retrovirus, human elongation factor-1 promoter (EF1), a hybrid construct comprising the cytomegalovirus (CMV) enhancer fused to the chicken beta-actin promoter (CAG), murine stem cell virus promoter (MSCV), phosphoglycerate kinase-1 locus promoter (PGK), and mouse metallothionein-I.

[0212] For expressing small RNAs, including guide RNAs used in connection with Cas endonuclease, various promoters such as RNA polymerase III promoters, including for example U6 and H1, can be advantageous. Descriptions of and parameters for enhancing the use of such promoters are known in art, and additional information and approaches are regularly being described; see, e.g., Ma, H. et al., Molecular Therapy-Nucleic Acids 3, e161 (2014) doi:10.1038/mtna.2014.12.

[0213] The expression vector can also contain a ribosome binding site for translation initiation and a transcription terminator. The expression vector can also comprise appropriate sequences for amplifying expression. The expression vector can also include nucleotide sequences encoding non-native tags (e.g., histidine tag, hemagglutinin tag, green fluorescent protein, etc.) that are fused to the site-directed polypeptide, thus resulting in a fusion protein.

[0214] A promoter can be an inducible promoter (e.g., a heat shock promoter, tetracycline-regulated promoter, steroid-regulated promoter, metal-regulated promoter, estrogen receptor-regulated promoter, etc.). The promoter can be a constitutive promoter (e.g., CMV promoter, UBC promoter). In some cases, the promoter can be a spatially restricted and/or temporally restricted promoter (e.g., a tissue specific promoter, a cell type specific promoter, etc.).

[0215] The nucleic acid encoding a genome-targeting nucleic acid of the disclosure and/or a site-directed polypeptide can be packaged into or on the surface of delivery vehicles for delivery to cells. Delivery vehicles contemplated include, but are not limited to, nanospheres, liposomes, quantum dots, nanoparticles, polyethylene glycol particles, hydrogels, and micelles. As described in the art, a variety of targeting moieties can be used to enhance the preferential interaction of such vehicles with desired cell types or locations.

[0216] Introduction of the complexes, polypeptides, and nucleic acids of the disclosure into cells can occur by viral or bacteriophage infection, transfection, conjugation, protoplast fusion, lipofection, electroporation, nucleofection, calcium phosphate precipitation, polyethyleneimine (PEI)-mediated transfection, DEAE-dextran mediated transfection, liposome-mediated transfection, particle gun technology, calcium phosphate precipitation, direct micro-injection, nanoparticle-mediated nucleic acid delivery, and the like.

### Ex Vivo Based Therapy

[0217] Provided herein are methods for treating a patient with Merosin-Deficient Congenital Muscular Dystrophy (MDCMD). An aspect of such method is an ex vivo cell-based therapy. For example, a biopsy of the patient's skeletal muscle is performed. Then, myocytes are isolated from the biopsied material. Then, the chromosomal DNA of the myocytes can be edited using the materials and methods described herein. Finally, the edited myocytes are implanted into the patient. Any source or type of cell may be used as the progenitor cell.

[0218] Another aspect of such method is an ex vivo cell-based therapy. For example, a biopsy of the patient's smooth muscle or cardiac muscle is performed. Then, myocytes are isolated from the biopsied material. Then, the chromosomal DNA of the myocytes can be edited using the materials and methods described herein. Finally, the edited myocytes are implanted into the patient. Any source or type of cell may be used as the progenitor cell.

[0219] Another aspect of such method is an ex vivo cell-based therapy. For example, a patient specific induced pluripotent stem cell (iPSC) can be created. Then, the chromosomal DNA of these iPSC cells can be edited using the materials and methods described herein. Next, the edited iPSCs can be differentiated into skeletal muscle cells, smooth muscle cells, cardiac muscle cells or Pax7+ muscle progenitor cells. Finally, the differentiated cells are implanted into the patient.

[0220] Yet another aspect of such method is an ex vivo cell-based therapy. For example, a mesenchymal stem cell can be isolated from the patient, which can be isolated from the patient's bone marrow or peripheral blood. Next, the chromosomal DNA of these mesenchymal stem cells can be edited using the materials and methods described herein. Next, the edited mesenchymal stem cells can be differentiated into skeletal muscle cells, smooth muscle cells, cardiac muscle cells or Pax7+ muscle progenitor cells. Finally, the differentiated cells are implanted into the patient.

[0221] One advantage of an ex vivo cell therapy approach is the ability to conduct a comprehensive analysis of the therapeutic prior to administration. Nuclease-based therapeutics can have some level of off-target effects. Performing gene correction ex vivo allows one to characterize the corrected cell population prior to implantation. The present disclosure includes sequencing the entire genome of the corrected cells to ensure that the off-target effects, if any, can be in genomic locations associated with minimal risk to the patient. Furthermore, populations of specific cells, including clonal populations, can be isolated prior to implantation.

[0222] Another advantage of ex vivo cell therapy relates to genetic correction in iPSCs compared to other primary cell sources. iPSCs are prolific, making it easy to obtain the large number of cells that will be required for a cell-based therapy. Furthermore, iPSCs are an ideal cell type for performing clonal isolations. This allows screening for the correct genomic correction, without risking a decrease in viability. In contrast, other primary cells, such as primary myoblasts, are viable for only a few passages and difficult to clonally expand. Thus, manipulation of iPSCs for the treatment of Merosin-Deficient Congenital Muscular Dystrophy (MDCMD) can be much easier, and can shorten the amount of time needed to make the desired genetic correction.

### In Vivo Based Therapy

[0223] Methods can also include an in vivo based therapy. Chromosomal DNA of the cells in the patient is edited using the materials and methods described herein.

[0224] Although certain cells present an attractive target for ex vivo treatment and therapy, increased efficacy in delivery may permit direct in vivo delivery to such cells. Ideally the targeting and editing would be directed to the relevant cells. Cleavage in other cells can also be prevented by the use of promoters only active in certain cells and or developmental stages. Additional promoters are inducible, and therefore can be temporally controlled if the nuclease is delivered as a plasmid. The amount of time that delivered RNA and protein remain in the cell can also be adjusted using treatments or domains added to change the half-life. In vivo treatment would eliminate a number of treatment steps, but a lower rate of delivery can require higher rates of editing. In vivo treatment can eliminate problems and losses from ex vivo treatment, engraftment, and post-engraftment integration of neurons and glial cells appropriately into existing brain circuits.

[0225] An advantage of in vivo gene therapy can be the ease of therapeutic production and administration. The same therapeutic approach and therapy will have the potential to be used to treat more than one patient, for example a number of patients who share the same or similar genotype or allele. In contrast, ex vivo cell therapy typically requires using a patient's own cells, which are isolated, manipulated and returned to the same patient.

[0226] Also provided herein is a cellular method for editing the LAMA2 gene in a cell by genome editing. For example, a cell can be isolated from a patient or animal. Then, the chromosomal DNA of the cell can be edited using the materials and methods described herein. microRNAs (miRNAs)

[0227] Another class of gene regulatory regions having these features is microRNA (miRNA) binding sites. miRNAs are non-coding RNAs that play key roles in post-transcriptional gene regulation. miRNA can regulate the expression of 30% of all mammalian protein-encoding genes. Specific and potent gene silencing by double stranded RNA (RNAi) was discovered, plus additional small non-coding RNA (Canver, M.C. et al., Nature (2015)). The largest class of non-coding RNAs important for gene silencing is miRNAs. In mammals, miRNAs are first transcribed as a long RNA transcript, which can be separate transcriptional units, part of protein introns, or other transcripts. The long transcripts are called primary miRNA (pri-miRNA) that include imperfectly base-paired hairpin structures. These pri-miRNA can be cleaved into one or more shorter precursor miRNAs (pre-miRNAs) by Microprocessor, a protein complex in the nucleus, involving Drosha.

[0228] Pre-miRNAs are short stem loops -70 nucleotides in length with a 2-nucleotide 3′-overhang that are exported, into the mature 19-25 nucleotide miRNA:miRNA* duplexes. The miRNA strand with lower base pairing stability (the guide strand) can be loaded onto the RNA-induced silencing complex (RISC). The passenger strand (marked with *), can be functional, but is usually degraded. The mature miRNA tethers RISC to partly complementary sequence motifs in target mRNAs predominantly found within the 3′ untranslated regions (UTRs) and induces posttranscriptional gene silencing (Bartel, D. P. Cell 136, 215-233 (2009); Saj, A. & Lai, E. C. Curr Opin Genet Dev 21, 504-510 (2011)).

[0229] miRNAs can be important in development, differentiation, cell cycle and growth control, and in virtually all biological pathways in mammals and other multicellular organisms. miRNAs can also be involved in cell cycle control, apoptosis and stem cell differentiation, hematopoiesis, hypoxia, muscle development, neurogenesis, insulin secretion, cholesterol metabolism, aging, viral replication and immune responses.

[0230] A single miRNA can target hundreds of different mRNA transcripts, while an individual miRNA transcript can be targeted by many different miRNAs. More than 28645 microRNAs have been annotated in the latest release of miRBase (v.21). Some miRNAs can be encoded by multiple loci, some of which can be expressed from tandemly co-transcribed clusters. The features allow for complex regulatory networks with multiple pathways and feedback controls. miRNAs can be integral parts of these feedback and regulatory circuits and can help regulate gene expression by keeping protein production within limits (Herranz, H. & Cohen, S. M. Genes Dev 24, 1339-1344 (2010); Posadas, D. M. & Carthew, R. W. Curr Opin Genet Dev 27, 1-6 (2014)).

[0231] miRNA can also be important in a large number of human diseases that are associated with abnormal miRNA expression. This association underscores the importance of the miRNA regulatory pathway. Recent miRNA deletion studies have linked miRNA with regulation of the immune responses (Stern-Ginossar, N. et al., Science 317, 376-381 (2007)).

[0232] miRNA also has a strong link to cancer and can play a role in different types of cancer. miRNAs have been found to be downregulated in a number of tumors. miRNA can be important in the regulation of key cancer-related pathways, such as cell cycle control and the DNA damage response, and can therefore be used in diagnosis and can be targeted clinically. MicroRNAs can delicately regulate the balance of angiogenesis, such that experiments depleting all microRNAs suppress tumor angiogenesis (Chen, S. et al., Genes Dev 28, 1054-1067 (2014)).

[0233] As has been shown for protein coding genes, miRNA genes can also be subject to epigenetic changes occurring with cancer. Many miRNA loci can be associated with CpG islands increasing their opportunity for regulation by DNA methylation (Weber, B., Stresemann, C., Brueckner, B. & Lyko, F. Cell Cycle 6, 1001-1005 (2007)). The majority of studies have used treatment with chromatin remodeling drugs to reveal epigenetically silenced miRNAs.

[0234] In addition to their role in RNA silencing, miRNA can also activate translation (Posadas, D. M. & Carthew, R. W. Curr Opin Genet Dev 27, 1-6 (2014)). Knocking out miRNA sites may lead to decreased expression of the targeted gene, while introducing these sites may increase expression.

[0235] Individual miRNA can be knocked out most effectively by mutating the seed sequence (bases 2-8 of the microRNA), which can be important for binding specificity. Cleavage in this region, followed by mis-repair by NHEJ can effectively abolish miRNA function by blocking binding to target sites. miRNA could also be inhibited by specific targeting of the special loop region adjacent to the palindromic sequence. Catalytically inactive Cas9 can also be used to inhibit shRNA expression (Zhao, Y. et al., Sci Rep 4, 3943 (2014)). In addition to targeting the miRNA, the binding sites can also be targeted and mutated to prevent the silencing by miRNA.

[0236] According to the present disclosure, any of the microRNA (miRNA) or their binding sites may be incorporated into the compositions of the present disclosure.

[0237] The compositions may have a region such as, but not limited to, a region comprising the sequence of any of the microRNAs disclosed in SEQ ID NOs: 632-4715, the reverse complement of the microRNAs disclosed in SEQ ID NOs: 632-4715, or the microRNA anti-seed region of any of the microRNAs disclosed in SEQ ID NOs: 632-4715.

[0238] The compositions of the present disclosure may comprise one or more microRNA target sequences, microRNA sequences, or microRNA seeds. Such sequences may correspond to any known microRNA such as those taught in U.S. Publication 2005/0261218 and U.S. Publication 2005/0059005. As a non-limiting example, known microRNAs, their sequences and their binding site sequences in the human genome are disclosed in SEQ ID NOs: 632-4715.

[0239] A microRNA sequence comprises a “seed” sequence, i.e., a sequence in the region of positions 2-8 of the mature microRNA, which sequence has perfect Watson-Crick complementarity to the miRNA target sequence. A microRNA seed may comprise positions 2-8 or 2-7 of the mature microRNA. In some aspects, a microRNA seed may comprise 7 nucleotides (e.g., nucleotides 2-8 of the mature microRNA), wherein the seed-complementary site in the corresponding miRNA target is flanked by an adenine (A) opposed to microRNA position 1. In some aspects, a microRNA seed may comprise 6 nucleotides (e.g., nucleotides 2-7 of the mature microRNA), wherein the seed-complementary site in the corresponding miRNA target is flanked by an adenine (A) opposed to microRNA position 1. See for example, Grimson A, Farh K K, Johnston W K, Garrett-Engele P, Lim L P, Bartel D P; Mol Cell. 2007 July 6; 27(1):91-105. The bases of the microRNA seed have complete complementarity with the target sequence.

[0240] Identification of microRNA, microRNA target regions, and their expression patterns and role in biology have been reported (Bonauer et al., Curr Drug Targets 2010 11:943-949; Anand and Cheresh Curr Opin Hematol 2011 18:171-176; Contreras and Rao Leukemia 2012 26:404-413 (2011 Dec. 20. doi: 10.1038/leu.2011.356); Bartel Cell 2009 136:215-233; Landgraf et al, Cell, 2007 129:1401-1414; Gentner and Naldini, Tissue Antigens. 2012 80:393-403).

[0241] For example, if the composition is not intended to be delivered to the liver but ends up there, then miR-122, a microRNA abundant in liver, can inhibit the expression of the sequence delivered if one or multiple target sites of miR-122 are engineered into the polynucleotide encoding that target sequence. Introduction of one or multiple binding sites for different microRNA can be engineered to further decrease the longevity, stability, and protein translation hence providing an additional layer of tenability.

[0242] As used herein, the term “microRNA site” refers to a microRNA target site or a microRNA recognition site, or any nucleotide sequence to which a microRNA binds or associates. It should be understood that “binding” may follow traditional Watson-Crick hybridization rules or may reflect any stable association of the microRNA with the target sequence at or adjacent to the microRNA site.

[0243] Conversely, for the purposes of the compositions of the present disclosure, microRNA binding sites can be engineered out of (i.e. removed from) sequences in which they naturally occur in order to increase protein expression in specific tissues. For example, miR-206 binding sites may be removed to improve protein expression in the cardiac and skeletal muscle.

[0244] Specifically, microRNAs are known to be differentially expressed in immune cells (also called hematopoietic cells), such as antigen presenting cells (APCs) (e.g. dendritic cells and macrophages), macrophages, monocytes, B lymphocytes, T lymphocytes, granulocytes, natural killer cells, etc. Immune cell specific microRNAs are involved in immunogenicity, autoimmunity, the immune -response to infection, inflammation, as well as unwanted immune response after gene therapy and tissue/organ transplantation. Immune cells specific microRNAs also regulate many aspects of development, proliferation, differentiation and apoptosis of hematopoietic cells (immune cells). For example, miR-142 and miR-146 are exclusively expressed in the immune cells, particularly abundant in myeloid dendritic cells. Introducing the miR-142 binding site into the 3′-UTR of a polypeptide of the present disclosure can selectively suppress the gene expression in the antigen presenting cells through miR-142 mediated mRNA degradation, limiting antigen presentation in professional APCs (e.g. dendritic cells) and thereby preventing antigen-mediated immune response after gene delivery (see, Annoni A et al., blood, 2009, 114, 5152-5161).

[0245] In one example, microRNAs binding sites that are known to be expressed in immune cells, in particular, the antigen presenting cells, can be engineered into the polynucleotides to suppress the expression of the polynucleotide in APCs through microRNA mediated RNA degradation, subduing the antigen-mediated immune response, while the expression of the polynucleotide is maintained in non-immune cells where the immune cell specific microRNAs are not expressed.

[0246] Many microRNA expression studies have been conducted, and are described in the art, to profile the differential expression of microRNAs in various cancer cells/tissues and other diseases. Some microRNAs are abnormally over-expressed in certain cancer cells and others are under-expressed. For example, microRNAs are differentially expressed in cancer cells (WO2008/154098, US2013/0059015, US2013/0042333, WO2011/157294); cancer stem cells (US2012/0053224); pancreatic cancers and diseases (US2009/0131348, US2011/0171646, US2010/0286232, U.S. Pat. No. 8,389,210); asthma and inflammation (U.S. Pat. No. 8,415,096); prostate cancer (US2013/0053264); hepatocellular carcinoma (WO2012/151212, US2012/0329672, WO2008/054828, U.S. Pat. No. 8,252,538); lung cancer cells (WO2011/076143, WO2013/033640, WO2009/070653, US2010/0323357); cutaneous T-cell lymphoma (WO2013/011378); colorectal cancer cells (WO2011/0281756, WO2011/076142); cancer positive lymph nodes (WO2009/100430, US2009/0263803); nasopharyngeal carcinoma (EP2112235); chronic obstructive pulmonary disease (US2012/0264626, US2013/0053263); thyroid cancer (WO2013/066678); ovarian cancer cells (US2012/0309645, WO2011/095623); breast cancer cells (WO2008/154098, WO2007/081740, US2012/0214699), leukemia and lymphoma (WO2008/073915, US2009/0092974, US2012/0316081, US2012/0283310, WO2010/018563).

[0247] Non-limiting examples of microRNA sequences and the targeted tissues and/or cells are disclosed in SEQ ID NOs: 632-4715.

### Genome Engineering Strategies

[0248] The methods of the present disclosure can involve correction of one or both of the mutant alleles. Gene editing to correct the mutation has the advantage of restoration of correct expression levels and temporal control. Sequencing the patient's LAMA2 alleles allows for design of the gene editing strategy to best correct the identified mutation(s).

[0249] A step of the ex vivo methods of the present disclosure can comprise editing/correcting the progenitor cell, iPSC cell, or mesenchymal stem cell. Alternatively, a step of the in vivo methods of the present disclosure involves editing/correcting the cells in a Merosin-Deficient Congenital Muscular Dystrophy (MDCMD) patient using genome engineering. Similarly, a step in the cellular methods of the present disclosure can comprise editing/correcting the LAMA2 gene in a human cell by genome engineering.

[0250] Merosin-Deficient Congenital Muscular Dystrophy (MDCMD) patients exhibit a wide range of mutations in the LAMA2 gene. Therefore, different patients may require different correction strategies. Any CRISPR endonuclease may be used in the methods of the present disclosure, each CRISPR endonuclease having its own associated PAM, which may or may not be disease specific.

[0251] For example, if there are small or large deletions or multiple mutations, a wild-type gene, a cDNA or a minigene (comprised of one or more exons and introns or natural or synthetic introns) can be knocked into the gene locus or a heterologous location in the genome such as a safe harbor locus. Pairs of nucleases can be used to delete mutated gene regions, and a donor is provided to restore function. In this case two gRNAs and one donor sequence would be supplied. A full length cDNA can be knocked into any safe harbor locus, but must use a supplied or other promoter. If this construct is knocked into the correct location, it will have physiological control, similar to the normal gene.

[0252] For example, the mutation can be corrected by the insertions or deletions that arise due to the imprecise NHEJ repair pathway. If the patient's LAMA2 gene has an inserted or deleted base, a targeted cleavage can result in a NHEJ-mediated insertion or deletion that restores the frame. Missense mutations can also be corrected through NHEJ-mediated correction using one or more guide RNA. The ability or likelihood of the cut(s) to correct the mutation can be designed or evaluated based on the local sequence and micro-homologies. NHEJ can also be used to delete segments of the gene, either directly or by altering splice donor or acceptor sites through cleavage by one gRNA targeting several locations, or several gRNAs. This may be useful if an amino acid, domain or exon contains the mutations and can be removed or inverted, or if the deletion otherwise restored function to the protein. Pairs of guide strands have been used for deletions and corrections of inversions.

[0253] Alternatively, the donor for correction by HDR contains the corrected sequence with small or large flanking homology arms to allow for annealing. HDR is essentially an error-free mechanism that uses a supplied homologous DNA sequence as a template during DSB repair. The rate of homology directed repair (HDR) is a function of the distance between the mutation and the cut site so choosing overlapping or nearest target sites is important. Templates can include extra sequences flanked by the homologous regions or can contain a sequence that differs from the genomic sequence, thus allowing sequence editing.

[0254] Some genome engineering strategies involve correction of one or more mutations in or near the LAMA2 gene, or knocking-in a wild-type LAMA2 gene, a cDNA or a minigene (comprised of one or more exons and introns or natural or synthetic introns) into the locus of the corresponding gene or a safe harbor locus by homology directed repair (HDR), which is also known as homologous recombination (HR). Homology directed repair can be one strategy for treating patients that have one or more mutations in or near the LAMA2 gene. These strategies can restore the LAMA2 gene and reverse, treat, and/or mitigate the diseased state. These strategies can require a more custom approach based on the location of the patient's mutation(s). Donor nucleotides for correcting mutations often are small (<300 bp). This is advantageous, as HDR efficiencies may be inversely related to the size of the donor molecule. Also, it is expected that the donor templates can fit into size constrained adeno-associated virus (AAV) molecules, which have been shown to be an effective means of donor template delivery.

[0255] Homology directed repair is a cellular mechanism for repairing double-stranded breaks (DSBs). The most common form is homologous recombination. There are additional pathways for HDR, including single-strand annealing and alternative-HDR. Genome engineering tools allow researchers to manipulate the cellular homologous recombination pathways to create site-specific modifications to the genome. It has been found that cells can repair a double-stranded break using a synthetic donor molecule provided in trans. Therefore, by introducing a double-stranded break near a specific mutation and providing a suitable donor, targeted changes can be made in the genome. Specific cleavage increases the rate of HDR more than 1,000 fold above the rate of 1 in 10⁶ cells receiving a homologous donor alone. The rate of homology directed repair (HDR) at a particular nucleotide is a function of the distance to the cut site, so choosing overlapping or nearest target sites is important. Gene editing offers the advantage over gene addition, as correcting in situ leaves the rest of the genome unperturbed.

[0256] Supplied donors for editing by HDR vary markedly but can contain the intended sequence with small or large flanking homology arms to allow annealing to the genomic DNA. The homology regions flanking the introduced genetic changes can be 30 bp or smaller, or as large as a multi-kilobase cassette that can contain promoters, cDNAs, etc. Both single-stranded and double-stranded oligonucleotide donors have been used. These oligonucleotides range in size from less than 100 nt to over many kb, though longer ssDNA can also be generated and used. Double-stranded donors can be used, including PCR amplicons, plasmids, and mini-circles. In general, it has been found that an AAV vector can be a very effective means of delivery of a donor template, though the packaging limits for individual donors is <5kb. Active transcription of the donor increased HDR three-fold, indicating the inclusion of promoter may increase conversion. Conversely, CpG methylation of the donor decreased gene expression and HDR.

[0257] In addition to wild-type endonucleases, such as Cas9, nickase variants exist that have one or the other nuclease domain inactivated resulting in cutting of only one DNA strand. HDR can be directed from individual Cas nickases or using pairs of nickases that flank the target area. Donors can be single-stranded, nicked, or dsDNA.

[0258] The donor DNA can be supplied with the nuclease or independently by a variety of different methods, for example by transfection, nano-particle, micro-injection, or viral transduction. A range of tethering options have been proposed to increase the availability of the donors for HDR. Examples include attaching the donor to the nuclease, attaching to DNA binding proteins that bind nearby, or attaching to proteins that are involved in DNA end binding or repair.

[0259] The repair pathway choice can be guided by a number of culture conditions, such as those that influence cell cycling, or by targeting of DNA repair and associated proteins. For example, to increase HDR, key NHEJ molecules can be suppressed, such as KU70, KU80 or DNA ligase IV.

[0260] Without a donor present, the ends from a DNA break or ends from different breaks can be joined using the several non-homologous repair pathways in which the DNA ends are joined with little or no base-pairing at the junction. In addition to canonical NHEJ, there are similar repair mechanisms, such as alt-NHEJ. If there are two breaks, the intervening segment can be deleted or inverted. NHEJ repair pathways can lead to insertions, deletions or mutations at the joints.

[0261] NHEJ was used to insert a 15-kb inducible gene expression cassette into a defined locus in human cell lines after nuclease cleavage. (See e.g., Maresca, M., Lin, V.G., Guo, N. & Yang, Y., Genome Res 23, 539-546 (2013); Cristea et al. Biotechnology and Bioengineering, 110 (3):871-80 (2013); Suzuki et al. Nature, 540, 144-149 (2016)).

[0262] In addition to genome editing by NHEJ or HDR, site-specific gene insertions have been conducted that use both the NHEJ pathway and HDR. A combination approach may be applicable in certain settings, possibly including intron/exon borders. NHEJ may prove effective for ligation in the intron, while the error-free HDR may be better suited in the coding region.

[0263] The LAMA2 gene contains a number of exons as shown in Table 3. Any one or more of these exons or nearby introns can be repaired in order to correct a mutation and restore LAMA2 protein activity. Alternatively, there are various mutations associated with Merosin-Deficient Congenital Muscular Dystrophy (MDCMD), which are a combination of insertions, deletions, missense, nonsense, frameshift and other mutations, with the common effect of inactivating LAMA2. Any one or more of the mutations can be repaired in order to restore the inactive LAMA2. Alternatively, a LAMA2 gene or cDNA can be inserted to the locus of the corresponding gene to replace the mutant gene or knocked-in to a safe harbor locus, such as AAVS1. In some examples, the methods can provide one gRNA or a pair of gRNAs that can be used to facilitate incorporation of a new sequence from a polynucleotide donor template to correct one or more mutations or to knock-in a part of or the entire LAMA2 gene or cDNA.

[0264] The methods can provide gRNA pairs that make a deletion by cutting the gene twice, one gRNA cutting at the 5′ end of one or more mutations and the other gRNA cutting at the 3′ end of one or more mutations that facilitates insertion of a new sequence from a polynucleotide donor template to replace the one or more mutations. The cutting can be accomplished by a pair of DNA endonucleases that each makes a DSB in the genome, or by multiple nickases that together make a DSB in the genome.

[0265] Alternatively, the methods can provide one gRNA to make one double-strand cut around one or more mutations that facilitates insertion of a new sequence from a polynucleotide donor template to replace the one or more mutations. The double-strand cut can be made by a single DNA endonuclease or multiple nickases that together make a DSB in the genome.

[0266] Illustrative modifications within the LAMA2 gene include replacements within or near (proximal) to the mutations referred to above, such as within the region of less than 3 kb, less than 2 kb, less than 1 kb, less than 0.5 kb upstream or downstream of the specific mutation. Given the relatively wide variations of mutations in the LAMA2 gene, it will be appreciated that numerous variations of the replacements referenced above (including without limitation larger as well as smaller deletions), would be expected to result in restoration of the LAMA2 gene expression.

[0267] Such variants can include replacements that are larger in the 5′ and/or 3′ direction than the specific mutation in question, or smaller in either direction. Accordingly, by “near” or “proximal” with respect to specific replacements, it is intended that the SSB or DSB locus associated with a desired replacement boundary (also referred to herein as an endpoint) can be within a region that is less than about 3 kb from the reference locus noted. The SSB or DSB locus can be more proximal and within 2 kb, within 1 kb, within 0.5 kb, or within 0.1 kb. In the case of small replacement, the desired endpoint can be at or “adjacent to” the reference locus, by which it is intended that the endpoint can be within 100 bp, within 50 bp, within 25 bp, or less than about 10 bp to 5 bp from the reference locus.

[0268] Examples comprising larger or smaller replacements can be expected to provide the same benefit, as long as the LAMA2 protein activity is restored. It is thus expected that many variations of the replacements described and illustrated herein can be effective for ameliorating Merosin-Deficient Congenital Muscular Dystrophy (MDCMD).

[0269] In order to ensure that the pre-mRNA is properly processed following deletion, the surrounding splicing signals can be deleted. Splicing donor and acceptors are generally within 100 base pairs of the neighboring intron. In some examples, methods can provide all gRNAs that cut approximately +/−100-3100 bp with respect to each exon/intron junction of interest.

[0270] For any of the genome editing strategies, gene editing can be confirmed by sequencing or PCR analysis.

### Target Sequence Selection

[0271] Shifts in the location of the 5′ boundary and/or the 3′ boundary relative to particular reference loci can be used to facilitate or enhance particular applications of gene editing, which depend in part on the endonuclease system selected for the editing, as further described and illustrated herein.

[0272] In a first non-limiting example of such target sequence selection, many endonuclease systems have rules or criteria that can guide the initial selection of potential target sites for cleavage, such as the requirement of a PAM sequence motif in a particular position adjacent to the DNA cleavage sites in the case of CRISPR Type II or Type V endonucleases.

[0273] In another non-limiting example of target sequence selection or optimization, the frequency of off-target activity for a particular combination of target sequence and gene editing endonuclease (i.e. the frequency of DSBs occurring at sites other than the selected target sequence) can be assessed relative to the frequency of on-target activity. In some cases, cells that have been correctly edited at the desired locus can have a selective advantage relative to other cells. Illustrative, but non-limiting, examples of a selective advantage include the acquisition of attributes such as enhanced rates of replication, persistence, resistance to certain conditions, enhanced rates of successful engraftment or persistence in vivo following introduction into a patient, and other attributes associated with the maintenance or increased numbers or viability of such cells. In other cases, cells that have been correctly edited at the desired locus can be positively selected for by one or more screening methods used to identify, sort or otherwise select for cells that have been correctly edited. Both selective advantage and directed selection methods can take advantage of the phenotype associated with the correction.

[0274] In some cases, cells can be edited two or more times in order to create a second modification that creates a new phenotype that is used to select or purify the intended population of cells. Such a second modification could be created by adding a second gRNA enabling expression of a selectable or screenable marker. In some cases, cells can be correctly edited at the desired locus using a DNA fragment that contains the cDNA and also a selectable marker.

[0275] Whether any selective advantage is applicable or any directed selection is to be applied in a particular case, target sequence selection can also be guided by consideration of off-target frequencies in order to enhance the effectiveness of the application and/or reduce the potential for undesired alterations at sites other than the desired target. As described further and illustrated herein and in the art, the occurrence of off-target activity can be influenced by a number of factors including similarities and dissimilarities between the target site and various off-target sites, as well as the particular endonuclease used. Bioinformatics tools are available that assist in the prediction of off-target activity, and frequently such tools can also be used to identify the most likely sites of off-target activity, which can then be assessed in experimental settings to evaluate relative frequencies of off-target to on-target activity, thereby allowing the selection of sequences that have higher relative on-target activities. Illustrative examples of such techniques are provided herein, and others are known in the art.

[0276] Another aspect of target sequence selection relates to homologous recombination events. Sequences sharing regions of homology can serve as focal points for homologous recombination events that result in deletion of intervening sequences. Such recombination events occur during the normal course of replication of chromosomes and other DNA sequences, and also at other times when DNA sequences are being synthesized, such as in the case of repairs of double-strand breaks (DSBs), which occur on a regular basis during the normal cell replication cycle but can also be enhanced by the occurrence of various events (such as UV light and other inducers of DNA breakage) or the presence of certain agents (such as various chemical inducers). Many such inducers cause DSBs to occur indiscriminately in the genome, and DSBs can be regularly induced and repaired in normal cells. During repair, the original sequence can be reconstructed with complete fidelity, however, in some cases, small insertions or deletions (referred to as “indels”) are introduced at the DSB site.

[0277] DSBs can also be specifically induced at particular locations, as in the case of the endonucleases systems described herein, which can be used to cause directed or preferential gene modification events at selected chromosomal locations. The tendency for homologous sequences to be subject to recombination in the context of DNA repair (as well as replication) can be taken advantage of in a number of circumstances, and is the basis for one application of gene editing systems, such as CRISPR, in which homology directed repair is used to insert a sequence of interest, provided through use of a “donor” polynucleotide, into a desired chromosomal location.

[0278] Regions of homology between particular sequences, which can be small regions of “microhomology” that can comprise as few as ten base pairs or less, can also be used to bring about desired deletions. For example, a single DSB can be introduced at a site that exhibits microhomology with a nearby sequence. During the normal course of repair of such DSB, a result that occurs with high frequency is the deletion of the intervening sequence as a result of recombination being facilitated by the DSB and concomitant cellular repair process.

[0279] In some circumstances, however, selecting target sequences within regions of homology can also give rise to much larger deletions, including gene fusions (when the deletions are in coding regions), which may or may not be desired given the particular circumstances.

[0280] The examples provided herein further illustrate the selection of various target regions for the creation of DSBs designed to induce replacements that result in restoration of LAMA2 protein activity, as well as the selection of specific target sequences within such regions that are designed to minimize off-target events relative to on-target events.

### Human Cells

[0281] For ameliorating Merosin-Deficient Congenital Muscular Dystrophy (MDCMD) or any disorder associated with LAMA2, as described and illustrated herein, the principal targets for gene editing are human cells. For example, in the ex vivo methods, the human cells can be somatic cells, which after being modified using the techniques as described, can give rise to differentiated cells, e.g., skeletal muscle cells, smooth muscle cells, or cardiac muscle cells. For example, in the in vivo methods, the human cells may be skeletal muscle cells, smooth muscle cells, cardiac muscle cells, or cells from other affected organs.

[0282] By performing gene editing in autologous cells that are derived from and therefore already completely matched with the patient in need, it is possible to generate cells that can be safely re-introduced into the patient, and effectively give rise to a population of cells that will be effective in ameliorating one or more clinical conditions associated with the patient's disease.

[0283] Stem cells are capable of both proliferation and giving rise to more progenitor cells, these in turn having the ability to generate a large number of mother cells that can in turn give rise to differentiated or differentiable daughter cells. The daughter cells themselves can be induced to proliferate and produce progeny that subsequently differentiate into one or more mature cell types, while also retaining one or more cells with parental developmental potential. The term “stem cell” refers then, to a cell with the capacity or potential, under particular circumstances, to differentiate to a more specialized or differentiated phenotype, and which retains the capacity, under certain circumstances, to proliferate without substantially differentiating. In one aspect, the term progenitor or stem cell refers to a generalized mother cell whose descendants (progeny) specialize, often in different directions, by differentiation, e.g., by acquiring completely individual characters, as occurs in progressive diversification of embryonic cells and tissues. Cellular differentiation is a complex process typically occurring through many cell divisions. A differentiated cell may derive from a multipotent cell that itself is derived from a multipotent cell, and so on. While each of these multipotent cells may be considered stem cells, the range of cell types that each can give rise to may vary considerably. Some differentiated cells also have the capacity to give rise to cells of greater developmental potential. Such capacity may be natural or may be induced artificially upon treatment with various factors. In many biological instances, stem cells can also be “multipotent” because they can produce progeny of more than one distinct cell type, but this is not required for “stem-ness.”

[0284] Self-renewal can be another important aspect of the stem cell. In theory, self-renewal can occur by either of two major mechanisms. Stem cells can divide asymmetrically, with one daughter retaining the stem state and the other daughter expressing some distinct other specific function and phenotype. Alternatively, some of the stem cells in a population can divide symmetrically into two stems, thus maintaining some stem cells in the population as a whole, while other cells in the population give rise to differentiated progeny only. Generally, “progenitor cells” have a cellular phenotype that is more primitive (i.e., is at an earlier step along a developmental pathway or progression than is a fully differentiated cell). Often, progenitor cells also have significant or very high-proliferative potential. Progenitor cells can give rise to multiple distinct differentiated cell types or to a single differentiated cell type, depending on the developmental pathway and on the environment in which the cells develop and differentiate.

[0285] In the context of cell ontogeny, the adjective “differentiated,” or “differentiating” is a relative term. A “differentiated cell” is a cell that has progressed further down the developmental pathway than the cell to which it is being compared. Thus, stem cells can differentiate into lineage-restricted precursor cells (such as a myocyte progenitor cell), which in turn can differentiate into other types of precursor cells further down the pathway (such as a myocyte precursor), and then to an end-stage differentiated cell, such as a myocyte, which plays a characteristic role in a certain tissue type, and may or may not retain the capacity to proliferate further.

### Induced Pluripotent Stem Cells

[0286] The genetically engineered human cells described herein can be induced pluripotent stem cells (iPSCs). An advantage of using iPSCs is that the cells can be derived from the same subject to which the progenitor cells are to be administered. That is, a somatic cell can be obtained from a subject, reprogrammed to an induced pluripotent stem cell, and then re-differentiated into a progenitor cell to be administered to the subject (e.g., autologous cells). Because the progenitors are essentially derived from an autologous source, the risk of engraftment rejection or allergic response can be reduced compared to the use of cells from another subject or group of subjects. In addition, the use of iPSCs negates the need for cells obtained from an embryonic source. Thus, in one aspect, the stem cells used in the disclosed methods are not embryonic stem cells.

[0287] Although differentiation is generally irreversible under physiological contexts, several methods have been recently developed to reprogram somatic cells to iPSCs. Exemplary methods are known to those of skill in the art and are described briefly herein below.

[0288] The term “reprogramming” refers to a process that alters or reverses the differentiation state of a differentiated cell (e.g., a somatic cell). Stated another way, reprogramming refers to a process of driving the differentiation of a cell backwards to a more undifferentiated or more primitive type of cell. It should be noted that placing many primary cells in culture can lead to some loss of fully differentiated characteristics. Thus, simply culturing such cells included in the term differentiated cells does not render these cells non-differentiated cells (e.g., undifferentiated cells) or pluripotent cells. The transition of a differentiated cell to pluripotency requires a reprogramming stimulus beyond the stimuli that lead to partial loss of differentiated character in culture. Reprogrammed cells also have the characteristic of the capacity of extended passaging without loss of growth potential, relative to primary cell parents, which generally have capacity for only a limited number of divisions in culture.

[0289] The cell to be reprogrammed can be either partially or terminally differentiated prior to reprogramming. Reprogramming can encompass complete reversion of the differentiation state of a differentiated cell (e.g., a somatic cell) to a pluripotent state or a multipotent state. Reprogramming can encompass complete or partial reversion of the differentiation state of a differentiated cell (e.g., a somatic cell) to an undifferentiated cell (e.g., an embryonic-like cell). Reprogramming can result in expression of particular genes by the cells, the expression of which further contributes to reprogramming. In certain examples described herein, reprogramming of a differentiated cell (e.g., a somatic cell) can cause the differentiated cell to assume an undifferentiated state (e.g., is an undifferentiated cell). The resulting cells are referred to as “reprogrammed cells,” or “induced pluripotent stem cells (iPSCs or iPS cells).”

[0290] Reprogramming can involve alteration, e.g., reversal, of at least some of the heritable patterns of nucleic acid modification (e.g., methylation), chromatin condensation, epigenetic changes, genomic imprinting, etc., that occur during cellular differentiation. Reprogramming is distinct from simply maintaining the existing undifferentiated state of a cell that is already pluripotent or maintaining the existing less than fully differentiated state of a cell that is already a multipotent cell (e.g., a myogenic stem cell). Reprogramming is also distinct from promoting the self-renewal or proliferation of cells that are already pluripotent or multipotent, although the compositions and methods described herein can also be of use for such purposes, in some examples.

[0291] Many methods are known in the art that can be used to generate pluripotent stem cells from somatic cells. Any such method that reprograms a somatic cell to the pluripotent phenotype would be appropriate for use in the methods described herein.

[0292] Reprogramming methodologies for generating pluripotent cells using defined combinations of transcription factors have been described. Mouse somatic cells can be converted to ES cell-like cells with expanded developmental potential by the direct transduction of Oct4, Sox2, Klf4, and c-Myc; see, e.g., Takahashi and Yamanaka, Cell 126(4): 663-76 (2006). iPSCs resemble ES cells, as they restore the pluripotency-associated transcriptional circuitry and much of the epigenetic landscape. In addition, mouse iPSCs satisfy all the standard assays for pluripotency: specifically, in vitro differentiation into cell types of the three germ layers, teratoma formation, contribution to chimeras, germline transmission [see, e.g., Maherali and Hochedlinger, Cell Stem Cell. 3(6):595-605 (2008)], and tetraploid complementation.

[0293] Human iPSCs can be obtained using similar transduction methods, and the transcription factor trio, OCT4, SOX2, and NANOG, has been established as the core set of transcription factors that govern pluripotency; see, e.g., Budniatzky and Gepstein, Stem Cells Transl Med. 3(4):448-57 (2014); Barrett et al., Stem Cells Trans Med 3:1-6 sctm.2014-0121 (2014); Focosi et al., Blood Cancer Journal 4: e211 (2014); and references cited therein. The production of iPSCs can be achieved by the introduction of nucleic acid sequences encoding stem cell-associated genes into an adult, somatic cell, historically using viral vectors.

[0294] iPSCs can be generated or derived from terminally differentiated somatic cells, as well as from adult stem cells, or somatic stem cells. That is, a non-pluripotent progenitor cell can be rendered pluripotent or multipotent by reprogramming. In such instances, it may not be necessary to include as many reprogramming factors as required to reprogram a terminally differentiated cell. Further, reprogramming can be induced by the non-viral introduction of reprogramming factors, e.g., by introducing the proteins themselves, or by introducing nucleic acids that encode the reprogramming factors, or by introducing messenger RNAs that upon translation produce the reprogramming factors (see e.g., Warren et al., Cell Stem Cell, 7(5):618-30 (2010). Reprogramming can be achieved by introducing a combination of nucleic acids encoding stem cell-associated genes, including, for example, Oct-4 (also known as Oct-3/4 or Pouf51), Sox1, Sox2, Sox3, Sox 15, Sox 18, NANOG, Klf1, Klf2, Klf4, Klf5, NR5A2, c-Myc, 1-Myc, n-Myc, Rem2, Tert, and LIN28. Reprogramming using the methods and compositions described herein can further comprise introducing one or more of Oct-3/4, a member of the Sox family, a member of the Klf family, and a member of the Myc family to a somatic cell. The methods and compositions described herein can further comprise introducing one or more of each of Oct-4, Sox2, Nanog, c-MYC and Klf4 for reprogramming. As noted above, the exact method used for reprogramming is not necessarily critical to the methods and compositions described herein. However, where cells differentiated from the reprogrammed cells are to be used in, e.g., human therapy, in one aspect the reprogramming is not effected by a method that alters the genome. Thus, in such examples, reprogramming can be achieved, e.g., without the use of viral or plasmid vectors.

[0295] The efficiency of reprogramming (i.e., the number of reprogrammed cells) derived from a population of starting cells can be enhanced by the addition of various agents, e.g., small molecules, as shown by Shi et al., Cell-Stem Cell 2:525-528 (2008); Huangfu et al., Nature Biotechnology 26(7):795-797 (2008) and Marson et al., Cell-Stem Cell 3: 132-135 (2008). Thus, an agent or combination of agents that enhance the efficiency or rate of induced pluripotent stem cell production can be used in the production of patient-specific or disease-specific iPSCs. Some non-limiting examples of agents that enhance reprogramming efficiency include soluble Wnt, Wnt conditioned media, BIX-01294 (a G9a histone methyltransferase), PD0325901 (a MEK inhibitor), DNA methyltransferase inhibitors, histone deacetylase (HDAC) inhibitors, valproic acid, 5′-azacytidine, dexamethasone, suberoylanilide, hydroxamic acid (SAHA), vitamin C, and trichostatin (TSA), among others.

[0296] Other non-limiting examples of reprogramming enhancing agents include: Suberoylanilide Hydroxamic Acid (SAHA (e.g., MK0683, vorinostat) and other hydroxamic acids), BML-210, Depudecin (e.g., (-)-Depudecin), HC Toxin, Nullscript (4-(1,3-Dioxo-1H,3H-benzo[de]isoquinolin-2-yl)-N-hydroxybutanamide), Phenylbutyrate (e.g., sodium phenylbutyrate) and Valproic Acid ((VP A) and other short chain fatty acids), Scriptaid, Suramin Sodium, Trichostatin A (TSA), APHA Compound 8, Apicidin, Sodium Butyrate, pivaloyloxymethyl butyrate (Pivanex, AN-9), Trapoxin B, Chlamydocin, Depsipeptide (also known as FR901228 or FK228), benzamides (e.g., CI-994 (e.g., N-acetyl dinaline) and MS-27-275), MGCD0103, NVP-LAQ-824, CBHA (m-carboxycinnaminic acid bishydroxamic acid), JNJ16241199, Tubacin, A-161906, proxamide, oxamflatin, 3-Cl-UCHA (e.g., 6-(3-chlorophenylureido) caproic hydroxamic acid), AOE (2-amino-8-oxo-9, 10-epoxydecanoic acid), CHAP31 and CHAP 50. Other reprogramming enhancing agents include, for example, dominant negative forms of the HDACs (e.g., catalytically inactive forms), siRNA inhibitors of the HDACs, and antibodies that specifically bind to the HDACs. Such inhibitors are available, e.g., from BIOMOL International, Fukasawa, Merck Biosciences, Novartis, Gloucester Pharmaceuticals, Titan Pharmaceuticals, MethylGene, and Sigma Aldrich.

[0297] To confirm the induction of pluripotent stem cells for use with the methods described herein, isolated clones can be tested for the expression of a stem cell marker. Such expression in a cell derived from a somatic cell identifies the cells as induced pluripotent stem cells. Stem cell markers can be selected from the non-limiting group including SSEA3, SSEA4, CD9, Nanog, Fbx15, Ecat1, Esg1, Eras, Gdf3, Fgf4, Cripto, Dax1, Zpf296, Slc2a3, Rex1, Utf1, and Nat1. In one case, for example, a cell that expresses Oct4 or Nanog is identified as pluripotent. Methods for detecting the expression of such markers can include, for example, RT-PCR and immunological methods that detect the presence of the encoded polypeptides, such as Western blots or flow cytometric analyses. Detection can involve not only RT-PCR, but can also include detection of protein markers. Intracellular markers may be best identified via RT-PCR, or protein detection methods such as immunocytochemistry, while cell surface markers are readily identified, e.g., by immunocytochemistry.

[0298] The pluripotent stem cell character of isolated cells can be confirmed by tests evaluating the ability of the iPSCs to differentiate into cells of each of the three germ layers. As one example, teratoma formation in nude mice can be used to evaluate the pluripotent character of the isolated clones. The cells can be introduced into nude mice and histology and/or immunohistochemistry can be performed on a tumor arising from the cells. The growth of a tumor comprising cells from all three germ layers, for example, further indicates that the cells are pluripotent stem cells.

### Muscle Cells

[0299] In some aspects, the genetically engineered human cells described herein are myocytes, i.e., cells of the muscle. The muscle is composed of three types of tissue, namely, cardiac, smooth, and skeletal. Cardiac muscle cells are located in the walls of the heart and are under involuntary control. Smooth muscle fibers are located in the walls of hollow visceral organs, except the heart, and are also under involuntary control. On the other hand, skeletal muscle fibers are under voluntary control and are located in muscles which are attached to the skeleton.

Creating Patient Specific iPSCs

[0300] One step of the ex vivo methods of the present disclosure can involve creating a patient specific iPS cell, patient specific iPS cells, or a patient specific iPS cell line. There are many established methods in the art for creating patient specific iPS cells, as described in Takahashi and Yamanaka 2006; Takahashi, Tanabe et al. 2007. For example, the creating step can comprise: a) isolating a somatic cell, such as a skin cell or fibroblast, from the patient; and b) introducing a set of pluripotency-associated genes into the somatic cell in order to induce the cell to become a pluripotent stem cell. The set of pluripotency-associated genes can be one or more of the genes selected from the group consisting of OCT4, SOX1, SOX2, SOX3, SOX15, SOX18, NANOG, KLF1, KLF2, KLF4, KLFS, c-MYC, n-MYC, REM2, TERT and LIN28. Performing a biopsy or aspirate of the patient's muscle or bone marrow

[0301] A biopsy or aspirate is a sample of tissue or fluid taken from the body. There are many different kinds of biopsies or aspirates. Nearly all of them involve using a sharp tool to remove a small amount of tissue. If the biopsy will be on the skin or other sensitive area, numbing medicine can be applied first. A biopsy or aspirate may be performed according to any of the known methods in the art. For example, in a needle biopsy of the muscle, a needle is inserted into the muscle. A small piece of tissue is retained in the needle when it is removed. For example, in an open biopsy of the muscle, a small cut is made in the skin and into the muscle, following which the muscle tissue is removed. For example, in a bone marrow aspirate, a large needle is used to enter the pelvis bone to collect bone marrow. Isolating a myocyte

[0302] Myocytes from the skeletal muscle may be isolated according to any method known in the art. For example, the isolated muscle is placed into a dish with 0.2% collagenase I solution and incubated for 2.5 hours. The muscle is dissected using Pasteur pipettes pre-flushed with HS solution. Using forceps, tendons and their attached myofibers are separated. The clumps of myofibers are triturated to separate out individual single myofibers. The myofibers are triturated further and eventually purified. The final myofiber suspension obtained is added to 35-mm culture dishes coated with isotonic Pure Col collagen and the dishes are incubated for a minimum of 20-30 minutes to allow formation of PureCol collagen matrix and the attachment of the myofibers to the matrix. The culture is supplied with myofiber culture medium, cells are cultured and characterized for expression of skeletal muscle markers such as Myf5, MyoD, myogenin, MYH2 (myosin heavy chain-2 protein) and alpha-tubulin protein (Keire et al., Methods in Molecular Biology, 2013; 946:431-468.)

[0303] Myocytes from the cardiac muscle, i.e. cardiomyocytes may be isolated according to any method known in the art. For example, human myocytes are isolated during routine cannulation procedures in patients who undergo open-heart surgery. Cardiomyocytes from the atria are isolated from the tip of the right atrial appendage. The tissue is excised and transferred into a petri dish with sterile Ca²⁺-free transport solution containing 2,3-butanedione monoxime and is dissected by chopping it into small chunks. The resulting mixture is stirred with a magnetic stirring bar and the supernatant obtained is strained through a 200 μm nylon mesh. The tissue chunks are subjected to a first enzymatic digestion of collagenase and protease and a second enzymatic digestion of collagenase I. The resulting supernatant is strained through a 200 μm mesh again and the cells are further disassociated by mechanical trituration via a 20 ml serological pipette with dispenser. The supernatant obtained is strained through a 200 μm nylon mesh again and centrifuged. The pellet obtained is resuspended in storage solution and 10 mM CaCl₂ solution. The cardiomyocytes are analyzed further for characterization of markers such as TNNT2, and NKX2-5 and cultured (Voight et al., Journal of Visualized Experiments, 2013;77:e50235).

[0304] Myocytes from the smooth muscle may be isolated according to any method known in the art. For example, a biopsy of the artery is performed and the artery, for example the aorta, is further dissected into small pieces. Explants with vessel lumens facing down are then placed in 100-mm culture plates. The explants are supplied with Dulbecco's modified eagle medium (DMEM) supplemented with 10% fetal bovine serum (FBS) along with antibiotics and antimycotics. Culture plates are incubated at 37° C. and cultured for 4 weeks, at which point the cells are confluent. Cells are grown in DMEM without serum for 24 hours at this stage. Cells are supplemented back with FBS and characterized for expression of markers such as alpha-smooth muscle actin, and smooth muscle myosin (Leik et al., Hypertension, 2004;43:837-840).

### Isolating a Mesenchymal Stem Cell

[0305] Mesenchymal stem cells can be isolated according to any method known in the art, such as from a patient's bone marrow or peripheral blood. For example, marrow aspirate can be collected into a syringe with heparin. Cells can be washed and centrifuged on a Percoll. The cells can be cultured in Dulbecco's modified Eagle's medium (DMEM) (low glucose) containing 10% fetal bovine serum (FBS) (Pittinger M F, Mackay A M, Beck S C et al., Science 1999; 284:143-147).

### Genetically Modified Cells

[0306] The term “genetically modified cell” refers to a cell that comprises at least one genetic modification introduced by genome editing (e.g., using the CRISPR/Cas9 or CRISPR/Cpf1 system). In some ex vivo examples herein, the genetically modified cell can be genetically modified progenitor cell. In some in vivo examples herein, the genetically modified cell can be a genetically modified skeletal muscle cell, smooth muscle cell, or a cardiac muscle cell. A genetically modified cell comprising an exogenous genome-targeting nucleic acid and/or an exogenous nucleic acid encoding a genome-targeting nucleic acid is contemplated herein.

[0307] The term “control treated population” describes a population of cells that has been treated with identical media, viral induction, nucleic acid sequences, temperature, confluency, flask size, pH, etc., with the exception of the addition of the genome editing components. Any method known in the art can be used to measure restoration of LAMA2 gene or protein expression or activity, for example Western Blot analysis of the LAMA2 protein or real time PCR for quantifying LAMA2 mRNA.

[0308] The term “isolated cell” refers to a cell that has been removed from an organism in which it was originally found, or a descendant of such a cell. Optionally, the cell can be cultured in vitro, e.g., under defined conditions or in the presence of other cells. Optionally, the cell can be later introduced into a second organism or re-introduced into the organism from which it (or the cell from which it is descended) was isolated.

[0309] The term “isolated population” with respect to an isolated population of cells refers to a population of cells that has been removed and separated from a mixed or heterogeneous population of cells. In some cases, the isolated population can be a substantially pure population of cells, as compared to the heterogeneous population from which the cells were isolated or enriched. In some cases, the isolated population can be an isolated population of human progenitor cells, e.g., a substantially pure population of human progenitor cells, as compared to a heterogeneous population of cells comprising human progenitor cells and cells from which the human progenitor cells were derived.

[0310] The term “substantially enhanced,” with respect to a particular cell population, refers to a population of cells in which the occurrence of a particular type of cell is increased relative to pre-existing or reference levels, by at least 2-fold, at least 3-, at least 4-, at least 5-, at least 6-, at least 7-, at least 8-, at least 9, at least 10-, at least 20-, at least 50-, at least 100-, at least 400-, at least 1000-, at least 5000-, at least 20000-, at least 100000- or more fold depending, e.g., on the desired levels of such cells for ameliorating Merosin-Deficient Congenital Muscular Dystrophy (MDCMD).

[0311] The term “substantially enriched” with respect to a particular cell population, refers to a population of cells that is at least about 10%, about 20%, about 30%, about 40%, about 50%, about 60%, about 70% or more with respect to the cells making up a total cell population.

[0312] The term “substantially pure” with respect to a particular cell population, refers to a population of cells that is at least about 75%, at least about 85%, at least about 90%, or at least about 95% pure, with respect to the cells making up a total cell population. That is, the terms “substantially pure” or “essentially purified,” with regard to a population of progenitor cells, refers to a population of cells that contain fewer than about 20%, about 15%, about 10%, about 9%, about 8%, about 7%, about 6%, about 5%, about 4%, about 3%, about 2%, about 1%, or less than 1%, of cells that are not progenitor cells as defined by the terms herein.

Differentiation of Genome-Edited iPSCs into Muscle Cells

[0313] Another step of the ex vivo methods of the present disclosure can comprise differentiating the genome-edited iPSCs into skeletal muscle cells, smooth muscle cells, cardiac muscle cells or Pax7+ muscle progenitor cells. The differentiating step may be performed according to any method known in the art. For example, genome-edited iPSCs are differentiated into myocytes using various treatments, including MyoD, ETV2, FLI1, and ERG1. For example, genome-edited iPSCs are differentiated into cardiomyocytes using various treatments, including ascorbic acid, BMP4, GSK-inhibitor, BMP-inhibitor, Wnt/β-catenin signalling inhibitor. For example, genome-edited iPSCs are differentiated into vascular smooth muscle cells using various treatments, including development of embryoid bodies from genome-edited iPSCs, followed by differentiation of embryoid bodies into myogenic cells.

Differentiation of Genome-Edited Mesenchymal Stem Cells into Muscle Cells

[0314] Another step of the ex vivo methods of the present disclosure can comprise differentiating the genome-edited mesenchymal stem cells into skeletal muscle cells, smooth muscle cells, cardiac muscle cells or Pax7+ muscle progenitor cells. The differentiating step may be performed according to any method known in the art. For example, hMSCs are treated with various factors and hormones, including culturing the hMSCs with culture medium consisting of DMEM/Ham's F-12 with 10% FBS and 1% L-glutamine, culturing the hMSCs with differentiation medium containing DMEM/Ham's F12, 2% donor horse serum, 1% L-glutamine, 1 ng/mL bFGF, and 0.4 μg/mL dexamethasone.

Implanting Cells into Patients

[0315] Another step of the ex vivo methods of the present disclosure can comprise implanting the skeletal muscle cells, smooth muscle cells, cardiac muscle cells, or Pax7+ muscle progenitor cells into patients. This implanting step may be accomplished using any method of implantation known in the art. For example, the genetically modified cells may be injected directly in the patient's blood or injected into the desired muscle, otherwise administered to the patient.

### III. FORMULATIONS AND DELIVERY

### Pharmaceutically Acceptable Carriers

[0316] The ex vivo methods of administering progenitor cells to a subject contemplated herein involve the use of therapeutic compositions comprising progenitor cells.

[0317] Therapeutic compositions can contain a physiologically tolerable carrier together with the cell composition, and optionally at least one additional bioactive agent as described herein, dissolved or dispersed therein as an active ingredient. In some cases, the therapeutic composition is not substantially immunogenic when administered to a mammal or human patient for therapeutic purposes, unless so desired.

[0318] In general, the progenitor cells described herein can be administered as a suspension with a pharmaceutically acceptable carrier. One of skill in the art will recognize that a pharmaceutically acceptable carrier to be used in a cell composition will not include buffers, compounds, cryopreservation agents, preservatives, or other agents in amounts that substantially interfere with the viability of the cells to be delivered to the subject. A formulation comprising cells can include e.g., osmotic buffers that permit cell membrane integrity to be maintained, and optionally, nutrients to maintain cell viability or enhance engraftment upon administration. Such formulations and suspensions are known to those of skill in the art and/or can be adapted for use with the progenitor cells, as described herein, using routine experimentation.

[0319] A cell composition can also be emulsified or presented as a liposome composition, provided that the emulsification procedure does not adversely affect cell viability. The cells and any other active ingredient can be mixed with excipients that are pharmaceutically acceptable and compatible with the active ingredient, and in amounts suitable for use in the therapeutic methods described herein.

[0320] Additional agents included in a cell composition can include pharmaceutically acceptable salts of the components therein. Pharmaceutically acceptable salts include the acid addition salts (formed with the free amino groups of the polypeptide) that are formed with inorganic acids, such as, for example, hydrochloric or phosphoric acids, or such organic acids as acetic, tartaric, mandelic and the like. Salts formed with the free carboxyl groups can also be derived from inorganic bases, such as, for example, sodium, potassium, ammonium, calcium or ferric hydroxides, and such organic bases as isopropylamine, trimethylamine, 2-ethylamino ethanol, histidine, procaine and the like.

[0321] Physiologically tolerable carriers are well known in the art. Exemplary liquid carriers are sterile aqueous solutions that contain no materials in addition to the active ingredients and water, or contain a buffer such as sodium phosphate at physiological pH value, physiological saline or both, such as phosphate-buffered saline. Still further, aqueous carriers can contain more than one buffer salt, as well as salts such as sodium and potassium chlorides, dextrose, polyethylene glycol and other solutes. Liquid compositions can also contain liquid phases in addition to and to the exclusion of water. Exemplary of such additional liquid phases are glycerin, vegetable oils such as cottonseed oil, and water-oil emulsions. The amount of an active compound used in the cell compositions that is effective in the treatment of a particular disorder or condition can depend on the nature of the disorder or condition, and can be determined by standard clinical techniques.

### Guide RNA Formulation

[0322] Guide RNAs of the present disclosure can be formulated with pharmaceutically acceptable excipients such as carriers, solvents, stabilizers, adjuvants, diluents, etc., depending upon the particular mode of administration and dosage form. Guide RNA compositions can be formulated to achieve a physiologically compatible pH, and range from a pH of about 3 to a pH of about 11, about pH 3 to about pH 7, depending on the formulation and route of administration. In some cases, the pH can be adjusted to a range from about pH 5.0 to about pH 8. In some cases, the compositions can comprise a therapeutically effective amount of at least one compound as described herein, together with one or more pharmaceutically acceptable excipients. Optionally, the compositions can comprise a combination of the compounds described herein, or can include a second active ingredient useful in the treatment or prevention of bacterial growth (for example and without limitation, anti-bacterial or anti-microbial agents), or can include a combination of reagents of the present disclosure.

[0323] Suitable excipients include, for example, carrier molecules that include large, slowly metabolized macromolecules such as proteins, polysaccharides, polylactic acids, polyglycolic acids, polymeric amino acids, amino acid copolymers, and inactive virus particles. Other exemplary excipients can include antioxidants (for example and without limitation, ascorbic acid), chelating agents (for example and without limitation, EDTA), carbohydrates (for example and without limitation, dextrin, hydroxyalkylcellulose, and hydroxyalkylmethylcellulose), stearic acid, liquids (for example and without limitation, oils, water, saline, glycerol and ethanol), wetting or emulsifying agents, pH buffering substances, and the like.

### Delivery

[0324] Guide RNA polynucleotides (RNA or DNA) and/or endonuclease polynucleotide(s) (RNA or DNA) can be delivered by viral or non-viral delivery vehicles known in the art. Alternatively, endonuclease polypeptide(s) can be delivered by viral or non-viral delivery vehicles known in the art, such as electroporation or lipid nanoparticles. In further alternative aspects, the DNA endonuclease can be delivered as one or more polypeptides, either alone or pre-complexed with one or more guide RNAs, or one or more crRNA together with a tracrRNA.

[0325] Polynucleotides can be delivered by non-viral delivery vehicles including, but not limited to, nanoparticles, liposomes, ribonucleoproteins, positively charged peptides, small molecule RNA-conjugates, aptamer-RNA chimeras, and RNA-fusion protein complexes. Some exemplary non-viral delivery vehicles are described in Peer and Lieberman, Gene Therapy, 18: 1127-1133 (2011) (which focuses on non-viral delivery vehicles for siRNA that are also useful for delivery of other polynucleotides).

[0326] For polynucleotides of the present disclosure, the formulation may be selected from any of those taught, for example, in International Application PCT/US2012/069610.

[0327] Polynucleotides, such as guide RNA, sgRNA, and mRNA encoding an endonuclease, may be delivered to a cell or a patient by a lipid nanoparticle (LNP).

[0328] A LNP refers to any particle having a diameter of less than 1000 nm, 500 nm, 250 nm, 200 nm, 150 nm, 100 nm, 75 nm, 50 nm, or 25 nm. Alternatively, a nanoparticle may range in size from 1-1000 nm, 1-500 nm, 1-250 nm, 25-200 nm, 25-100 nm, 35-75 nm, or 25-60 nm. [000327] LNPs may be made from cationic, anionic, or neutral lipids. Neutral lipids, such as the fusogenic phospholipid DOPE or the membrane component cholesterol, may be included in LNPs as ‘helper lipids’ to enhance transfection activity and nanoparticle stability. Limitations of cationic lipids include low efficacy owing to poor stability and rapid clearance, as well as the generation of inflammatory or anti-inflammatory responses.

[0329] LNPs may also be comprised of hydrophobic lipids, hydrophilic lipids, or both hydrophobic and hydrophilic lipids.

[0330] Any lipid or combination of lipids that are known in the art can be used to produce a LNP. Examples of lipids used to produce LNPs are: DOTMA, DOSPA, DOTAP, DMRIE, DC-cholesterol, DOTAP-cholesterol, GAP-DMORIE-DPyPE, and GL67A-DOPE-DMPE-polyethylene glycol (PEG). Examples of cationic lipids are: 98N12-5, C12-200, DLin-KC2-DMA (KC2), DLin-MC3-DMA (MC3), XTC, MD1, and 7C1. Examples of neutral lipids are: DPSC, DPPC, POPC, DOPE, and SM. Examples of PEG-modified lipids are: PEG-DMG, PEG-CerC14, and PEG-CerC20.

[0331] The lipids can be combined in any number of molar ratios to produce a LNP. In addition, the polynucleotide(s) can be combined with lipid(s) in a wide range of molar ratios to produce a LNP.

[0332] As stated previously, the site-directed polypeptide and genome-targeting nucleic acid can each be administered separately to a cell or a patient. On the other hand, the site-directed polypeptide can be pre-complexed with one or more guide RNAs, or one or more crRNA together with a tracrRNA. The pre-complexed material can then be administered to a cell or a patient. Such pre-complexed material is known as a ribonucleoprotein particle (RNP).

[0333] RNA is capable of forming specific interactions with RNA or DNA. While this property is exploited in many biological processes, it also comes with the risk of promiscuous interactions in a nucleic acid-rich cellular environment. One solution to this problem is the formation of ribonucleoprotein particles (RNPs), in which the RNA is pre-complexed with an endonuclease. Another benefit of the RNP is protection of the RNA from degradation.

[0334] The endonuclease in the RNP can be modified or unmodified. Likewise, the gRNA, crRNA, tracrRNA, or sgRNA can be modified or unmodified. Numerous modifications are known in the art and can be used.

[0335] The endonuclease and sgRNA can be generally combined in a 1:1 molar ratio. Alternatively, the endonuclease, crRNA and tracrRNA can be generally combined in a 1:1:1 molar ratio. However, a wide range of molar ratios can be used to produce a RNP.

### AAV (Adeno Associated Virus)

[0336] A recombinant adeno-associated virus (AAV) vector can be used for delivery. Techniques to produce rAAV particles, in which an AAV genome to be packaged that includes the polynucleotide to be delivered, rep and cap genes, and helper virus functions are provided to a cell are standard in the art. Production of rAAV typically requires that the following components are present within a single cell (denoted herein as a packaging cell): a rAAV genome, AAV rep and cap genes separate from (i.e., not in) the rAAV genome, and helper virus functions. The AAV rep and cap genes may be from any AAV serotype for which recombinant virus can be derived, and may be from a different AAV serotype than the rAAV genome ITRs, including, but not limited to, AAV serotypes described herein. Production of pseudotyped rAAV is disclosed in, for example, international patent application publication number WO 01/83692.

### AAV Serotypes

[0337] AAV particles packaging polynucleotides encoding compositions of the present disclosure, e.g., endonucleases, donor sequences, or RNA guide molecules, of the present disclosure may comprise or be derived from any natural or recombinant AAV serotype. According to the present disclosure, the AAV particles may utilize or be based on a serotype selected from any of the following serotypes, and variants thereof including but not limited to AAV1, AAV10, AAV106.1/hu.37, AAV11, AAV114.3/hu.40, AAV12, AAV127.2/hu.41, AAV127.5/hu.42, AAV128.1/hu.43, AAV128.3/hu.44, AAV130.4/hu.48, AAV145.1/hu.53, AAV145.5/hu.54, AAV145.6/hu.55, AAV16.12/hu.11, AAV16.3, AAV16.8/hu.10, AAV161.10/hu.60, AAV161.6/hu.61, AAV1-7/rh.48, AAV1-8/rh.49, AAV2, AAV2.5T, AAV2-15/rh.62, AAV223.1, AAV223.2, AAV223.4, AAV223.5, AAV223.6, AAV223.7, AAV2-3/rh.61, AAV24.1, AAV2-4/rh.50, AAV2-5/rh.51, AAV27.3, AAV29.3/bb.1, AAV29.5/bb.2, AAV2G9, AAV-2-pre-miRNA-101, AAV3, AAV3.1/hu.6, AAV3.1/hu.9, AAV3-11/rh.53, AAV3-3, AAV33.12/hu.17, AAV33.4/hu.15, AAV33.8/hu.16, AAV3-9/rh.52, AAV3a, AAV3b, AAV4, AAV4-19/rh.55, AAV42.12, AAV42-10, AAV42-11, AAV42-12, AAV42-13, AAV42-15, AAV42-1b, AAV42-2, AAV42-3a, AAV42-3b, AAV42-4, AAV42-5a, AAV42-5b, AAV42-6b, AAV42-8, AAV42-aa, AAV43-1, AAV43-12, AAV43-20, AAV43-21, AAV43-23, AAV43-25, AAV43-5, AAV4-4, AAV44.1, AAV44.2, AAV44.5, AAV46.2/hu.28, AAV46.6/hu.29, AAV4-8/r11.64, AAV4-8/rh.64, AAV4-9/rh.54, AAVS, AAV52.1/hu.20, AAV52/hu.19, AAV5-22/rh.58, AAV5-3/rh.57, AAV54.1/hu.21, AAV54.2/hu.22, AAV54.4R/hu.27, AAV54.5/hu.23, AAV54.7/hu.24, AAV58.2/hu.25, AAV6, AAV6.1, AAV6.1.2, AAV6.2, AAV7, AAV7.2, AAV7.3/hu.7, AAV8, AAV-8b, AAV-8h, AAV9, AAV9.11, AAV9.13, AAV9.16, AAV9.24, AAV9.45, AAV9.47, AAV9.61, AAV9.68, AAV9.84, AAV9.9, AAVA3.3, AAVA3.4, AAVA3.5, AAVA3.7, AAV-b, AAVC1, AAVC2, AAVCS, AAVCh.5, AAVCh.5R1, AAVcy.2, AAVcy.3, AAVcy.4, AAVcy.5, AAVCy.5R1, AAVCy.5R2, AAVCy.5R3, AAVCy.5R4, AAVcy.6, AAV-DJ, AAV-DJ8, AAVF3, AAVFS, AAV-h, AAVH-1/hu.1, AAVH2, AAVH-5/hu.3, AAVH6, AAVhE1.1, AAVhER1.14, AAVhEr1.16, AAVhEr1.18, AAVhER1.23, AAVhEr1.35, AAVhEr1.36, AAVhEr1.5, AAVhEr1.7, AAVhEr1.8, AAVhEr2.16, AAVhEr2.29, AAVhEr2.30, AAVhEr2.31, AAVhEr2.36, AAVhEr2.4, AAVhEr3.1, AAVhu.1, AAVhu.10, AAVhu.11, AAVhu.11, AAVhu.12, AAVhu.13, AAVhu.14/9, AAVhu.15, AAVhu.16, AAVhu.17, AAVhu.18, AAVhu.19, AAVhu.2, AAVhu.20, AAVhu.21, AAVhu.22,

[0338] AAVhu.23.2, AAVhu.24, AAVhu.25, AAVhu.27, AAVhu.28, AAVhu.29, AAVhu.29R, AAVhu.3, AAVhu.31, AAVhu.32, AAVhu.34, AAVhu.35, AAVhu.37, AAVhu.39, AAVhu.4, AAVhu.40, AAVhu.41, AAVhu.42, AAVhu.43, AAVhu.44, AAVhu.44R1, AAVhu.44R2, AAVhu.44R3, AAVhu.45, AAVhu.46, AAVhu.47, AAVhu.48, AAVhu.48R1, AAVhu.48R2, AAVhu.48R3, AAVhu.49, AAVhu.5, AAVhu.51, AAVhu.52, AAVhu.53, AAVhu.54, AAVhu.55, AAVhu.56, AAVhu.57, AAVhu.58, AAVhu.6, AAVhu.60, AAVhu.61, AAVhu.63, AAVhu.64, AAVhu.66, AAVhu.67, AAVhu.7, AAVhu.8, AAVhu.9, AAVhu.t 19, AAVLG-10/rh.40, AAVLG-4/rh.38, AAVLG-9/hu.39, AAVLG-9/hu.39, AAV-LK01, AAV-LK02, AAVLK03, AAV-LK03, AAV-LK04, AAV-LK05, AAV-LK06, AAV-LK07, AAV-LK08, AAV-LK09, AAV-LK10, AAV-LK11, AAV-LK12, AAV-LK13, AAV-LK14, AAV-LK15, AAV-LK17, AAV-LK18, AAV-LK19, AAVN721-8/rh.43, AAV-PAEC, AAV-PAEC11, AAV-PAEC12, AAV-PAEC2, AAV-PAEC4, AAV-PAEC6, AAV-PAEC7, AAV-PAEC8, AAVpi.1, AAVpi.2, AAVpi.3, AAVrh.10, AAVrh.12, AAVrh.13, AAVrh.13R, AAVrh.14, AAVrh.17, AAVrh.18, AAVrh.19, AAVrh.2, AAVrh.20, AAVrh.21, AAVrh.22, AAVrh.23, AAVrh.24, AAVrh.25, AAVrh.2R, AAVrh.31, AAVrh.32, AAVrh.33, AAVrh.34, AAVrh.35, AAVrh.36, AAVrh.37, AAVrh.37R2, AAVrh.38, AAVrh.39, AAVrh.40, AAVrh.43, AAVrh.44, AAVrh.45, AAVrh.46, AAVrh.47, AAVrh.48, AAVrh.48, AAVrh.48.1, AAVrh.48.1.2, AAVrh.48.2, AAVrh.49, AAVrh.50, AAVrh.51, AAVrh.52, AAVrh.53, AAVrh.54, AAVrh.55, AAVrh.56, AAVrh.57, AAVrh.58, AAVrh.59, AAVrh.60, AAVrh.61, AAVrh.62, AAVrh.64, AAVrh.64R1, AAVrh.64R2, AAVrh.65, AAVrh.67, AAVrh.68, AAVrh.69, AAVrh.70, AAVrh.72, AAVrh.73, AAVrh.74, AAVrh.8, AAVrh.8R, AAVrh8R, AAVrh8R A586R mutant, AAVrh8R R533A mutant, BAAV, BNP61 AAV, BNP62 AAV, BNP63 AAV, bovine AAV, caprine AAV, Japanese AAV 10, true type AAV (ttAAV), UPENN AAV 10, AAV-LK16, AAAV, AAV Shuffle 100-1, AAV Shuffle 100-2, AAV Shuffle 100-3, AAV Shuffle 100-7, AAV Shuffle 10-2, AAV Shuffle 10-6, AAV Shuffle 10-8, AAV SM 100-10, AAV SM 100-3, AAV SM 10-1, AAV SM 10-2, and/or AAV SM 10-8.

[0339] In some aspects, the AAV serotype may be, or have, a mutation in the AAV9 sequence as described by N Pulicherla et al. (Molecular Therapy 19(6):1070-1078 (2011)), such as but not limited to, AAV9.9, AAV9.11, AAV9.13, AAV9.16, AAV9.24, AAV9.45, AAV9.47, AAV9.61, AAV9.68, AAV9.84.

[0340] In some aspects, the AAV serotype may be, or have, a sequence as described in U.S. Pat. No. 6,156,303, such as, but not limited to, AAV3B (SEQ ID NO: 1 and 10 of U.S. Pat. No. 6,156,303), AAV6 (SEQ ID NO: 2, 7 and 11 of U.S. Pat. No. 6,156,303), AAV2 (SEQ ID NO: 3 and 8 of U.S. Pat. No. 6,156,303), AAV3A (SEQ ID NO: 4 and 9, of U.S. Pat. No. 6,156,303), or derivatives thereof.

[0341] In some aspects, the serotype may be AAVDJ or a variant thereof, such as AAVDJ8 (or AAV-DJ8), as described by Grimm et al. (Journal of Virology 82(12): 5887-5911 (2008)). The amino acid sequence of AAVDJ8 may comprise two or more mutations in order to remove the heparin binding domain (HBD). As a non-limiting example, the AAV-DJ sequence described as SEQ ID NO: 1 in U.S. Pat. No. 7,588,772, may comprise two mutations: (1) R587Q where arginine (R; Arg) at amino acid 587 is changed to glutamine (Q; Gln) and (2) R590T where arginine (R; Arg) at amino acid 590 is changed to threonine (T; Thr). As another non-limiting example, may comprise three mutations: (1) K406R where lysine (K; Lys) at amino acid 406 is changed to arginine (R; Arg), (2) R587Q where arginine (R; Arg) at amino acid 587 is changed to glutamine (Q; Gln) and (3) R590T where arginine (R; Arg) at amino acid 590 is changed to threonine (T; Thr).

[0342] In some aspects, the AAV serotype may be, or have, a sequence as described in International Publication No. WO2015121501, such as, but not limited to, true type AAV (ttAAV) (SEQ ID NO: 2 of WO2015121501), “UPenn AAV10” (SEQ ID NO: 8 of WO2015121501), “Japanese AAV10” (SEQ ID NO: 9 of WO2015121501), or variants thereof.

[0343] According to the present disclosure, AAV capsid serotype selection or use may be from a variety of species. In one example, the AAV may be an avian AAV (AAAV). The AAAV serotype may be, or have, a sequence as described in U.S. Pat. No. 9,238,800, such as, but not limited to, AAAV (SEQ ID NO: 1, 2, 4, 6, 8, 10, 12, and 14 of U.S. Pat. No. 9,238,800), or variants thereof.

[0344] In one example, the AAV may be a bovine AAV (BAAV). The BAAV serotype may be, or have, a sequence as described in U.S. Pat. No. 9,193,769, such as, but not limited to, BAAV (SEQ ID NO: 1 and 6 of U.S. Pat. No. 9,193,769), or variants thereof. The BAAV serotype may be or have a sequence as described in U.S. Pat. No. 7,427,396, such as, but not limited to, BAAV (SEQ ID NO: 5 and 6 of U.S. Pat. No. 7,427,396), or variants thereof.

[0345] In one example, the AAV may be a caprine AAV. The caprine AAV serotype may be, or have, a sequence as described in U.S. Pat. No. 7,427,396, such as, but not limited to, caprine AAV (SEQ ID NO: 3 of U.S. Pat. No. 7,427,396), or variants thereof.

[0346] In other examples, the AAV may be engineered as a hybrid AAV from two or more parental serotypes. In one example, the AAV may be AAV2G9 which comprises sequences from AAV2 and AAV9. The AAV2G9 AAV serotype may be, or have, a sequence as described in U.S. Patent Publication No. 20160017005.

[0347] In one example, the AAV may be a serotype generated by the AAV9 capsid library with mutations in amino acids 390-627 (VP1 numbering) as described by Pulicherla et al. (Molecular Therapy 19(6):1070-1078 (2011). The serotype and corresponding nucleotide and amino acid substitutions may be, but is not limited to, AAV9.1 (G1594C; D532H), AAV6.2 (T1418A and T1436X; V473D and I479K), AAV9.3 (T1238A; F413Y), AAV9.4 (T1250C and A1617T; F417S), AAV9.5 (A1235G, A1314T, A1642G, C1760T; Q412R, T548A, A587V), AAV9.6 (T1231A; F411I), AAV9.9 (G1203A, G1785T; W595C), AAV9.10 (A1500G, T1676C; M559T), AAV9.11 (A1425T, A1702C, A1769T; T568P, Q590L), AAV9.13 (A1369C, A1720T;

[0348] N457H, T574S), AAV9.14 (T1340A, T1362C, T1560C, G1713A; L447H), AAV9.16 (A1775T; Q592L), AAV9.24 (T1507C, T1521G; W503R), AAV9.26 (A1337G, A1769C; Y446C, Q590P), AAV9.33 (A1667C; D556A), AAV9.34 (A1534G, C1794T; N512D), AAV9.35 (A1289T, T1450A, C1494T, A1515T, C1794A, G1816A; Q430L, Y484N, N98K, V6061), AAV9.40 (A1694T, E565V), AAV9.41 (A1348T, T1362C; T450S), AAV9.44 (A1684C, A1701T, A1737G; N562H, K567N), AAV9.45 (A1492T, C1804T; N498Y, L602F), AAV9.46 (G1441C, T1525C, T1549G; G481R, W509R, L517V), 9.47 (G1241A, G1358A, A1669G, C1745T; S414N, G453D, K557E, T582I), AAV9.48 (C1445T, A1736T; P482L, Q579L), AAV9.50 (A1638T, C1683T, T1805A; Q546H, L602H), AAV9.53 (G1301A, A1405C, C1664T, G1811T; R134Q, S469R, A555V, G604V), AAV9.54 (C1531A, T1609A; L511I, L537M), AAV9.55 (T1605A; F535L), AAV9.58 (C1475T, C1579A; T492I, H527N), AAV.59 (T1336C; Y446H), AAV9.61 (A1493T; N498I), AAV9.64 (C1531A, A1617T; L511I), AAV9.65 (C1335T, T1530C, C1568A; A523D), AAV9.68 (C1510A; P504T), AAV9.80 (G1441A,;G481R), AAV9.83 (C1402A, A1500T; P468T, E500D), AAV9.87 (T1464C, T1468C; S490P), AAV9.90 (A1196T; Y399F), AAV9.91 (T1316G, A1583T, C1782G, T1806C; L439R, K528I), AAV9.93 (A1273G, A1421G, A1638C, C1712T, G1732A, A1744T, A1832T; S425G, Q474R, Q546H, P571L, G578R, T582S, D611V), AAV9.94 (A1675T; M559L) and AAV9.95 (T1605A; F535L).

[0349] In one example, the AAV may be a serotype comprising at least one AAV capsid CD8+T-cell epitope. As a non-limiting example, the serotype may be AAV1, AAV2 or AAV8.

[0350] In one example, the AAV may be a variant, such as PHP.A or PHP.B as described in Deverman. 2016. Nature Biotechnology. 34(2): 204-209.

[0351] In one example, the AAV may be a serotype selected from any of those found in SEQ ID NOs: 4734-5302 and Table 2.

[0352] In one example, the AAV may be encoded by a sequence, fragment or variant as disclosed in SEQ ID NOs: 4734-5302 and Table 2.

[0353] General principles of rAAV production are reviewed in, for example, Carter, 1992, Current Opinions in Biotechnology, 1533-539; and Muzyczka, 1992, Curr. Topics in Microbial. and Immunol., 158:97-129). Various approaches are described in Ratschin et al., Mol. Cell. Biol. 4:2072 (1984); Hermonat et al., Proc. Natl. Acad. Sci. USA, 81:6466 (1984); Tratschin et al., Mol. Cell. Biol. 5:3251 (1985); McLaughlin et al., J. Virol., 62:1963 (1988); and Lebkowski et al., 1988 Mol. Cell. Biol., 7:349 (1988). Samulski etal. (1989, J. Virol., 63:3822-3828); U.S. Pat. No. 5,173,414; WO 95/13365 and corresponding U.S. Pat. No. 5,658,776; WO 95/13392; WO 96/17947; PCT/US98/18600; WO 97/09441 (PCT/US96/14423); WO 97/08298 (PCT/US96/13872); WO 97/21825 (PCT/US96/20777); WO 97/06243 (PCT/FR96/01064); WO 99/11764; Perrin et al. (1995) Vaccine 13:1244-1250; Paul et al. (1993) Human Gene Therapy 4:609-615; Clark et al. (1996) Gene Therapy 3:1124-1132; U.S. Pat. No. 5,786,211; U.S. Pat. No. 5,871,982; and U.S. Pat. No. 6,258,595.

[0354] AAV vector serotypes can be matched to target cell types. For example, the following exemplary cell types can be transduced by the indicated AAV serotypes among others.

TABLE 2
Tissue/Cell Types and Serotypes

| Tissue/Cell Type | Serotype |
|---|---|
| Liver | AAV3, AAV5. AAV8, AAV9 |
| Skeletal muscle | AAV1, AAV7. AAV6, AAV8, AAV9 |
| Central nervous system | AAV1, AAV4. AAV5, AAV8, AAV9 |
| RPE | AAV5, AAV4. AAV2, AAV8, AAV9, |
| | AAVrh8R |
| Photoreceptor cells | AAV5, AAV8. AAV9, AAVrh8R |
| Lung | AAV9, AAV5 |
| Heart | AAV8 |
| Pancreas | AAV8 |
| Kidney | AAV2, AAV8 |
| Hematopoietic stem cells | AAV6 |

[0355] In addition to adeno-associated viral vectors, other viral vectors can be used. Such viral vectors include, but are not limited to, lentivirus, alphavirus, enterovirus, pestivirus, baculovirus, herpesvirus, Epstein Barr virus, papovavirus, poxvirus, vaccinia virus, and herpes simplex virus.

[0356] In some aspects, Cas9 mRNA, sgRNA targeting one or two sites in LAMA2 gene, and donor DNA can each be separately formulated into lipid nanoparticles, or are all co-formulated into one lipid nanoparticle.

[0357] In some aspects, Cas9 mRNA can be formulated in a lipid nanoparticle, while sgRNA and donor DNA can be delivered in an AAV vector.

[0358] Options are available to deliver the Cas9 nuclease as a DNA plasmid, as mRNA or as a protein. The guide RNA can be expressed from the same DNA, or can also be delivered as an RNA. The RNA can be chemically modified to alter or improve its half-life, or decrease the likelihood or degree of immune response. The endonuclease protein can be complexed with the gRNA prior to delivery. Viral vectors allow efficient delivery; split versions of Cas9 and smaller orthologs of Cas9 can be packaged in AAV, as can donors for HDR. A range of non-viral delivery methods also exist that can deliver each of these components, or non-viral and viral methods can be employed in tandem. For example, nano-particles can be used to deliver the protein and guide RNA, while AAV can be used to deliver a donor DNA.

### IV. DOSING AND ADMINISTRATION

[0359] The terms “administering,” “introducing” and “transplanting” are used interchangeably in the context of the placement of cells, e.g., progenitor cells, into a subject, by a method or route that results in at least partial localization of the introduced cells at a desired site, such as a site of injury or repair, such that a desired effect(s) is produced. The cells e.g., progenitor cells, or their differentiated progeny can be administered by any appropriate route that results in delivery to a desired location in the subject where at least a portion of the implanted cells or components of the cells remain viable. The period of viability of the cells after administration to a subject can be as short as a few hours, e.g., twenty-four hours, to a few days, to as long as several years, or even the life time of the patient, i.e., long-term engraftment. For example, in some aspects described herein, an effective amount of myogenic progenitor cells is administered via a systemic route of administration, such as an intraperitoneal or intravenous route.

[0360] The terms “individual,” “subject,” “host” and “patient” are used interchangeably herein and refer to any subject for whom diagnosis, treatment or therapy is desired. In some aspects, the subject is a mammal. In some aspects, the subject is a human being.

[0361] When provided prophylactically, progenitor cells described herein can be administered to a subject in advance of any symptom of Merosin-Deficient Congenital Muscular Dystrophy (MDCMD). Accordingly, the prophylactic administration of a progenitor cell population serves to prevent Merosin-Deficient Congenital Muscular Dystrophy (MDCMD).

[0362] A progenitor cell population being administered according to the methods described herein can comprise allogeneic progenitor cells obtained from one or more donors. Such progenitors may be of any cellular or tissue origin, e.g., liver, muscle, cardiac, etc. “Allogeneic” refers to a progenitor cell or biological samples comprising progenitor cells obtained from one or more different donors of the same species, where the genes at one or more loci are not identical. For example, a liver progenitor cell population being administered to a subject can be derived from one more unrelated donor subjects, or from one or more non-identical siblings. In some cases, syngeneic progenitor cell populations can be used, such as those obtained from genetically identical animals, or from identical twins. The progenitor cells can be autologous cells; that is, the progenitor cells are obtained or isolated from a subject and administered to the same subject, i.e., the donor and recipient are the same.

[0363] The term “effective amount” refers to the amount of a population of progenitor cells or their progeny needed to prevent or alleviate at least one or more signs or symptoms of Merosin-Deficient Congenital Muscular Dystrophy (MDCMD), and relates to a sufficient amount of a composition to provide the desired effect, e.g., to treat a subject having Merosin-Deficient Congenital Muscular Dystrophy (MDCMD). The term “therapeutically effective amount” therefore refers to an amount of progenitor cells or a composition comprising progenitor cells that is sufficient to promote a particular effect when administered to a typical subject, such as one who has or is at risk for Merosin-Deficient Congenital Muscular Dystrophy (MDCMD). An effective amount would also include an amount sufficient to prevent or delay the development of a symptom of the disease, alter the course of a symptom of the disease (for example but not limited to, slow the progression of a symptom of the disease), or reverse a symptom of the disease. It is understood that for any given case, an appropriate “effective amount” can be determined by one of ordinary skill in the art using routine experimentation.

[0364] For use in the various aspects described herein, an effective amount of progenitor cells comprises at least 10² progenitor cells, at least 5×10² progenitor cells, at least 10³ progenitor cells, at least 5×10³ progenitor cells, at least 10⁴ progenitor cells, at least 5×10⁴ progenitor cells, at least 10⁵ progenitor cells, at least 2×10⁵ progenitor cells, at least 3×10⁵ progenitor cells, at least 4×10⁵ progenitor cells, at least 5×10⁵ progenitor cells, at least 6 X 10⁵ progenitor cells, at least 7×10⁵ progenitor cells, at least 8×10⁵ progenitor cells, at least 9×10⁵ progenitor cells, at least 1×10⁶ progenitor cells, at least 2×10⁶ progenitor cells, at least 3×10⁶ progenitor cells, at least 4×10⁶ progenitor cells, at least 5×10⁶ progenitor cells, at least 6×10⁶ progenitor cells, at least 7×10⁶ progenitor cells, at least 8×10⁶ progenitor cells, at least 9×10⁶ progenitor cells, or multiples thereof. The progenitor cells can be derived from one or more donors, or can be obtained from an autologous source. In some examples described herein, the progenitor cells can be expanded in culture prior to administration to a subject in need thereof.

[0365] Modest and incremental increases in the levels of functional LAMA2 expressed in cells of patients having a LAMA2 related disorder can be beneficial for ameliorating one or more symptoms of the disease, for increasing long-term survival, and/or for reducing side effects associated with other treatments. Upon administration of such cells to human patients, the presence of progenitors that are producing increased levels of functional LAMA2 is beneficial. In some cases, effective treatment of a subject gives rise to at least about 3%, 5% or 7% functional LAMA2 relative to total LAMA2 in the treated subject. In some examples, functional LAMA2 will be at least about 10% of total LAMA2. In some examples, functional LAMA2 will be at least about 20% to 30% of total LAMA2. Similarly, the introduction of even relatively limited subpopulations of cells having significantly elevated levels of functional LAMA2 can be beneficial in various patients because in some situations normalized cells will have a selective advantage relative to diseased cells. However, even modest levels of progenitors with elevated levels of functional LAMA2 can be beneficial for ameliorating one or more aspects of Merosin-Deficient Congenital Muscular Dystrophy (MDCMD) in patients. In some examples, about 10%, about 20%, about 30%, about 40%, about 50%, about 60%, about 70%, about 80%, about 90% or more of the myogenic progenitors in patients to whom such cells are administered are producing increased levels of functional LAMA2.

[0366] “Administered” refers to the delivery of a progenitor cell composition into a subject by a method or route that results in at least partial localization of the cell composition at a desired site. A cell composition can be administered by any appropriate route that results in effective treatment in the subject, i.e. administration results in delivery to a desired location in the subject where at least a portion of the composition delivered, i.e. at least 1×10⁴ cells are delivered to the desired site for a period of time.

[0367] In one aspect of the method, the pharmaceutical composition may be administered via a route such as, but not limited to, enteral (into the intestine), gastroenteral, epidural (into the dura matter), oral (by way of the mouth), transdermal, peridural, intracerebral (into the cerebrum), intracerebroventricular (into the cerebral ventricles), epicutaneous (application onto the skin), intradermal, (into the skin itself), subcutaneous (under the skin), nasal administration (through the nose), intravenous (into a vein), intravenous bolus, intravenous drip, intraarterial (into an artery), intramuscular (into a muscle), intracardiac (into the heart), intraosseous infusion (into the bone marrow), intrathecal (into the spinal canal), intraperitoneal, (infusion or injection into the peritoneum), intravesical infusion, intravitreal, (through the eye), intracavernous injection (into a pathologic cavity) intracavitary (into the base of the penis), intravaginal administration, intrauterine, extra-amniotic administration, transdermal (diffusion through the intact skin for systemic distribution), transmucosal (diffusion through a mucous membrane), transvaginal, insufflation (snorting), sublingual, sublabial, enema, eye drops (onto the conjunctiva), in ear drops, auricular (in or by way of the ear), buccal (directed toward the cheek), conjunctival, cutaneous, dental (to a tooth or teeth), electro-osmosis, endocervical, endosinusial, endotracheal, extracorporeal, hemodialysis, infiltration, interstitial, intra-abdominal, intra-amniotic, intra-articular, intrabiliary, intrabronchial, intrabursal, intracartilaginous (within a cartilage), intracaudal (within the cauda equine), intracisternal (within the cisterna magna cerebellomedularis), intracorneal (within the cornea), dental intracornal, intracoronary (within the coronary arteries), intracorporus cavernosum (within the dilatable spaces of the corporus cavernosa of the penis), intradiscal (within a disc), intraductal (within a duct of a gland), intraduodenal (within the duodenum), intradural (within or beneath the dura), intraepidermal (to the epidermis), intraesophageal (to the esophagus), intragastric (within the stomach), intragingival (within the gingivae), intraileal (within the distal portion of the small intestine), intralesional (within or introduced directly to a localized lesion), intraluminal (within a lumen of a tube), intralymphatic (within the lymph), intramedullary (within the marrow cavity of a bone), intrameningeal (within the meninges), intramyocardial (within the myocardium), intraocular (within the eye), intraovarian (within the ovary), intrapericardial (within the pericardium), intrapleural (within the pleura), intraprostatic (within the prostate gland), intrapulmonary (within the lungs or its bronchi), intrasinal (within the nasal or periorbital sinuses), intraspinal (within the vertebral column), intrasynovial (within the synovial cavity of a joint), intratendinous (within a tendon), intratesticular (within the testicle), intrathecal (within the cerebrospinal fluid at any level of the cerebrospinal axis), intrathoracic (within the thorax), intratubular (within the tubules of an organ), intratumor (within a tumor), intratympanic (within the aurus media), intravascular (within a vessel or vessels), intraventricular (within a ventricle), iontophoresis (by means of electric current where ions of soluble salts migrate into the tissues of the body), irrigation (to bathe or flush open wounds or body cavities), laryngeal (directly upon the larynx), nasogastric (through the nose and into the stomach), occlusive dressing technique (topical route administration, which is then covered by a dressing that occludes the area), ophthalmic (to the external eye), oropharyngeal (directly to the mouth and pharynx), parenteral, percutaneous, periarticular, peridural, perineural, periodontal, rectal, respiratory (within the respiratory tract by inhaling orally or nasally for local or systemic effect), retrobulbar (behind the pons or behind the eyeball), intramyocardial (entering the myocardium), soft tissue, subarachnoid, subconjunctival, submucosal, topical, transplacental (through or across the placenta), transtracheal (through the wall of the trachea), transtympanic (across or through the tympanic cavity), ureteral (to the ureter), urethral (to the urethra), vaginal, caudal block, diagnostic, nerve block, biliary perfusion, cardiac perfusion, photopheresis and spinal.

[0368] Modes of administration include injection, infusion, instillation, and/or ingestion. “Injection” includes, without limitation, intravenous, intramuscular, intra-arterial, intrathecal, intraventricular, intracapsular, intraorbital, intracardiac, intradermal, intraperitoneal, transtracheal, subcutaneous, subcuticular, intraarticular, sub capsular, subarachnoid, intraspinal, intracerebro spinal, and intrasternal injection and infusion. In some examples, the route is intravenous. For the delivery of cells, administration by injection or infusion can be made.

[0369] The cells can be administered systemically. The phrases “systemic administration,” “administered systemically”, “peripheral administration” and “administered peripherally” refer to the administration of a population of progenitor cells other than directly into a target site, tissue, or organ, such that it enters, instead, the subject's circulatory system and, thus, is subject to metabolism and other like processes.

[0370] The efficacy of a treatment comprising a composition for the treatment of Merosin-Deficient Congenital Muscular Dystrophy (MDCMD) can be determined by the skilled clinician. However, a treatment is considered “effective treatment,” if any one or all of the signs or symptoms of, as but one example, levels of functional LAMA2 are altered in a beneficial manner (e.g., increased by at least 10%), or other clinically accepted symptoms or markers of disease are improved or ameliorated. Efficacy can also be measured by failure of an individual to worsen as assessed by hospitalization or need for medical interventions (e.g., progression of the disease is halted or at least slowed). Methods of measuring these indicators are known to those of skill in the art and/or described herein. Treatment includes any treatment of a disease in an individual or an animal (some non-limiting examples include a human, or a mammal) and includes: (1) inhibiting the disease, e.g., arresting, or slowing the progression of symptoms; or (2) relieving the disease, e.g., causing regression of symptoms; and (3) preventing or reducing the likelihood of the development of symptoms.

[0371] The treatment according to the present disclosure can ameliorate one or more symptoms associated with Merosin-Deficient Congenital Muscular Dystrophy (MDCMD) by increasing, decreasing or altering the amount of functional LAMA2 in the individual.

### V. FEATURES AND PROPERTIES OF THE LAMININ, ALPHA 2 (LAMA2) GENE

[0372] LAMA2 has been associated with diseases and disorders such as, but not limited to, Merosin-Deficient Congenital Muscular Dystrophy (MDCMD), Amyotrophic Lateral Sclerosis, Bladder Neoplasm, Charcot-Marie-Tooth Disease, Colorectal Carcinoma, Contracture, Cyst, Duchenne Muscular Dystrophy, Fatigue, Hyperopia, Renovascular Hypertension, melanoma, Mental Retardation, Myopathy, Muscular Dystrophy, Myopia, Myositis, Neuromuscular Diseases, Peripheral Neuropathy, Refractive Errors, Schizophrenia, Severe mental retardation (I.Q. 20-34), Thyroid Neoplasm, Tobacco Use Disorder, Severe Combined Immunodeficiency, Synovial Cyst, Adenocarcinoma of lung (disorder), Tumor Progression, Strawberry nevus of skin, Muscle degeneration, Microdontia (disorder), Walker-Warburg congenital muscular dystrophy, Chronic Periodontitis, Leukoencephalopathies, Impaired cognition, Fukuyama Type Congenital Muscular Dystrophy, Scleroatonic muscular dystrophy, Eichsfeld type congenital muscular dystrophy, Neuropathy, Muscle eye brain disease, Limb-Muscular Dystrophies, Girdle, Congenital muscular dystrophy (disorder), Muscle fibrosis, cancer recurrence, Drug Resistant Epilepsy, Respiratory Failure, Myxoid cyst, Abnormal breathing, Muscular dystrophy congenital merosin negative, Colorectal Cancer, Congenital Muscular Dystrophy due to Partial LAMA2 Deficiency, Autosomal Dominant Craniometaphyseal Dysplasia, and Intellectual Disability. Editing the LAMA2 gene using any of the methods described herein may be used to treat, prevent and/or mitigate the symptoms of the diseases and disorders described herein.

[0373] Mutations of LAMA2 gene are associated with Merosin-Deficient Congenital Muscular Dystrophy (MDCMD), also known as Muscular dystrophy, Congenital merosin-deficient, 1A, (MDC1A), which is a form of muscular dystrophy characterized by muscle weakness. The condition is inherited in an autosomal recessive pattern. Individuals with MDCMD show symptoms at birth or during the first 6 months of life. Typical symptoms include brain abnormalities, hypotonia, weak suck and cry, and delayed motor development. Patients have a shortened life expectancy. MDCMD affects approximately one in 30, 000 individuals. As of today, there is no drug therapy for MDCMD. The condition is treated with a variety of symptomatic and supportive therapies.

[0374] In one example, the target tissue for the compositions and methods described herein is muscle tissue, such as but not limited to skeletal muscle, smooth muscle, and cardiac muscle.

[0375] In one example, the gene is Laminin, Alpha 2 (LAMA2) which may also be referred to as Laminin-12 Subunit Alpha, Laminin-2 Subunit Alpha, Laminin-4 Subunit Alpha 3, Merosin Heavy Chain, Laminin M Chain, LAMM, Congenital Muscular Dystrophy and Merosin. LAMA2 has a cytogenetic location of 6q22.33 and the genomic coordinate are on Chromosome 6 on the forward strand at position 128,883,141-129,516,563. The nucleotide sequence of LAMA2 is shown as SEQ ID NO: 5303. Y RNA is the gene upstream of LAMA2 on the forward strand and Z97352.1 is the gene downstream of LAMA2 on the forward strand. MESTP1 is the gene located on the reverse strand opposite of LAMA2 and BMPR1APS1, RNU6-861P and RP1-69D17.3 are the genes located on the reverse strand opposite of LAMA2 with an overlap. LAMA2 has a NCBI gene ID of 3908, Uniprot ID of P24043 and Ensembl Gene ID of ENSG00000196569. LAMA2 has 31,228 SNPs, 79 introns and 79 exons. The exon identifier from Ensembl and the start/stop sites of the introns and exons are shown in Table 3.

TABLE 3
Exons and Introns for LAMA2

| Exon | | | Intron | Intron based on | |
|---|---|---|---|---|---|
| No. | Exon ID | Start/Stop | No. | Exon ID | Start/Stop |
| EX1 | ENSE00001879346 | 128,883,197- | INT1 | Intron | 128,883,358- |
| | | 128,883,357 | | ENSE00003732054- | 129,049,917 |
| | | | | ENSE00001148647 | |
| EX2 | ENSE00001148209 | 129,514,373- | INT2 | Intron | 129,445,822- |
| | | 129,514,595 | | ENSE00003729144- | 129,452,987 |
| | | | | ENSE00001148325 | |
| EX3 | ENSE00001148217 | 129,512,363- | INT3 | Intron | 129,445,822- |
| | | 129,512,493 | | ENSE00003724065- | 129,452,987 |
| | | | | ENSE00001148325 | |
| EX4 | ENSE00001148226 | 129,507,489- | INT4 | Intron | 129,492,484- |
| | | 129,507,642 | | ENSE00003643551- | 129,502,658 |
| | | | | ENSE00002497855 | |
| EX5 | ENSE00001148235 | 129,505,200- | INT5 | Intron | 129,492,078- |
| | | 129,505,355 | | ENSE00003611128- | 129,492,314 |
| | | | | ENSE00003535379 | |
| EX6 | ENSE00001148242 | 129,503,091- | INT6 | Intron | 129,492,078- |
| | | 129,503,280 | | ENSE00003610930- | 129,492,314 |
| | | | | ENSE00003643551 | |
| EX7 | ENSE00001148249 | 129,502,659- | INT7 | Intron | 129,492,078- |
| | | 129,502,771 | | ENSE00003610930- | 129,492,314 |
| | | | | ENSE00001852899 | |
| EX8 | ENSE00001148270 | 129,486,474- | INT8 | Intron | 129,492,484- |
| | | 129,486,622 | | ENSE00003535379- | 129,502,658 |
| | | | | ENSE00001148249 | |
| EX9 | ENSE00001148275 | 129,481,263- | INT9 | Intron | 129,475,402- |
| | | 129,481,439 | | ENSE00002503972- | 129,478,692 |
| | | | | ENSE00001148280 | |
| EX10 | ENSE00001148280 | 129,478,693- | INT10 | Intron | 129,443,069- |
| | | 129,478,813 | | ENSE00002502484- | 129,445,666 |
| | | | | ENSE00001148329 | |
| EX11 | ENSE00001148287 | 129,473,214- | INT11 | Intron | 129,490,796- |
| | | 129,473,352 | | ENSE00001954916- | 129,490,981 |
| | | | | ENSE00001891074 | |
| EX12 | ENSE00001148294 | 129,465,145- | INT12 | Intron | 129,491,080- |
| | | 129,465,289 | | ENSE00001891074- | 129,491,900 |
| | | | | ENSE00003610930 | |
| EX13 | ENSE00001148302 | 129,464,290- | INT13 | Intron | 128,883,358- |
| | | 129,464,452 | | ENSE00001879346- | 129,049,917 |
| | | | | ENSE00001148647 | |
| EX14 | ENSE00001148308 | 129,460,200- | INT14 | Intron | 128,883,358- |
| | | 129,460,324 | | ENSE00001878296- | 128,905,399 |
| | | | | ENSE00001816763 | |
| EX15 | ENSE00001148315 | 129,456,335- | INT15 | Intron | 129,490,796- |
| | | 129,456,494 | | ENSE00001874771- | 129,491,900 |
| | | | | ENSE00003610930 | |
| EX16 | ENSE00001148321 | 129,454,155- | INT16 | Intron | 128,905,581- |
| | | 129,454,288 | | ENSE00001816763- | 129,049,917 |
| | | | | ENSE00001872366 | |
| EX17 | ENSE00001148325 | 129,452,988- | INT17 | Intron | 129,050,089- |
| | | 129,453,131 | | ENSE00001148647- | 129,059,783 |
| | | | | ENSE00001148640 | |
| EX18 | ENSE00001148329 | 129,445,667- | INT18 | Intron | 129,059,897- |
| | | 129,445,821 | | ENSE00001148640- | 129,098,172 |
| | | | | ENSE00001148631 | |
| EX19 | ENSE00001148334 | 129,440,816- | INT19 | Intron | 129,098,416- |
| | | 129,440,998 | | ENSE00001148631- | 129,143,900 |
| | | | | ENSE00001148622 | |
| EX20 | ENSE00001148342 | 129,438,646- | INT20 | Intron | 129,144,081- |
| | | 129,438,762 | | ENSE00001148622- | 129,146,958 |
| | | | | ENSE00001148616 | |
| EX21 | ENSE00001148346 | 129,427,752- | INT21 | Intron | 129,147,049- |
| | | 129,427,854 | | ENSE00001148616- | 129,148,978 |
| | | | | ENSE00001148611 | |
| EX22 | ENSE00001148352 | 129,403,821- | INT22 | Intron | 129,149,097- |
| | | 129,403,959 | | ENSE00001148611- | 129,154,504 |
| | | | | ENSE00001148605 | |
| EX23 | ENSE00001148360 | 129,402,324- | INT23 | Intron | 129,154,684- |
| | | 129,402,487 | | ENSE00001148605- | 129,165,575 |
| | | | | ENSE00001148599 | |
| EX24 | ENSE00001148370 | 129,401,224- | INT24 | Intron | 129,165,676- |
| | | 129,401,340 | | ENSE00001148599- | 129,177,705 |
| | | | | ENSE00001148591 | |
| EX25 | ENSE00001148378 | 129,393,045- | INT25 | Intron | 129,177,867- |
| | | 129,393,255 | | ENSE00001148591- | 129,190,204 |
| | | | | ENSE00001148586 | |
| EX26 | ENSE00001148388 | 129,391,491- | INT26 | Intron | 129,190,346- |
| | | 129,391,653 | | ENSE00001148586- | 129,192,679 |
| | | | | ENSE00001148575 | |
| EX27 | ENSE00001148397 | 129,383,122- | INT27 | Intron | 129,192,854- |
| | | 129,383,233 | | ENSE00001148575- | 129,250,111 |
| | | | | ENSE00001148568 | |
| EX28 | ENSE00001148404 | 129,369,892- | INT28 | Intron | 129,250,214- |
| | | 129,369,990 | | ENSE00001148568- | 129,252,083 |
| | | | | ENSE00001148562 | |
| EX29 | ENSE00001148411 | 129,366,219- | INT29 | Intron | 129,252,296- |
| | | 129,366,361 | | ENSE00001148562- | 129,260,710 |
| | | | | ENSE00001148555 | |
| EX30 | ENSE00001148420 | 129,353,164- | INT30 | Intron | 129,260,823- |
| | | 129,353,357 | | ENSE00001148555- | 129,267,105 |
| | | | | ENSE00001148545 | |
| EX31 | ENSE00001148430 | 129,349,298- | INT31 | Intron | 129,267,220- |
| | | 129,349,384 | | ENSE00001148545- | 129,270,623 |
| | | | | ENSE00001148537 | |
| EX32 | ENSE00001148439 | 129,342,343- | INT32 | Intron | 129,270,752- |
| | | 129,342,467 | | ENSE00001148537- | 129,280,060 |
| | | | | ENSE00001148529 | |
| EX33 | ENSE00001148446 | 129,328,278- | INT33 | Intron | 129,280,148- |
| | | 129,328,412 | | ENSE00001148529- | 129,287,846 |
| | | | | ENSE00001148522 | |
| EX34 | ENSE00001148451 | 129,320,538- | INT34 | Intron | 129,288,059- |
| | | 129,320,655 | | ENSE00001148522- | 129,291,613 |
| | | | | ENSE00001148515 | |
| EX35 | ENSE00001148457 | 129,316,038- | INT35 | Intron | 129,291,721- |
| | | 129,316,171 | | ENSE00001148515- | 129,297,684 |
| | | | | ENSE00001148505 | |
| EX36 | ENSE00001148463 | 129,315,762- | INT36 | Intron | 129,297,866- |
| | | 129,315,950 | | ENSE00001148505- | 129,300,735 |
| | | | | ENSE00001148493 | |
| EX37 | ENSE00001148467 | 129,315,476- | INT37 | Intron | 129,300,873- |
| | | 129,315,655 | | ENSE00001148493- | 129,312,860 |
| | | | | ENSE00001148484 | |
| EX38 | ENSE00001148474 | 129,314,655- | INT38 | Intron | 129,313,098- |
| | | 129,314,798 | | ENSE00001148484- | 129,314,654 |
| | | | | ENSE00001148474 | |
| EX39 | ENSE00001148484 | 129,312,861- | INT39 | Intron | 129,314,799- |
| | | 129,313,097 | | ENSE00001148474- | 129,315,475 |
| | | | | ENSE00001148467 | |
| EX40 | ENSE00001148493 | 129,300,736- | INT40 | Intron | 129,315,656- |
| | | 129,300,872 | | ENSE00001148467- | 129,315,761 |
| | | | | ENSE00001148463 | |
| EX41 | ENSE00001148505 | 129,297,685- | INT41 | Intron | 129,315,951- |
| | | 129,297,865 | | ENSE00001148463- | 129,316,037 |
| | | | | ENSE00001148457 | |
| EX42 | ENSE00001148515 | 129,291,614- | INT42 | Intron | 129,316,172- |
| | | 129,291,720 | | ENSE00001148457- | 129,320,537 |
| | | | | ENSE00001148451 | |
| EX43 | ENSE00001148522 | 129,287,847- | INT43 | Intron | 129,320.656- |
| | | 129,288,058 | | ENSE00001148451- | 129,328.277 |
| | | | | ENSE00001148446 | |
| EX44 | ENSE00001148529 | 129,280,061- | INT44 | Intron | 129.328,413- |
| | | 129,280,147 | | ENSE00001148446- | 129.342,342 |
| | | | | ENSE00001148439 | |
| EX45 | ENSE00001148537 | 129,270,624- | INT45 | Intron | 129,342,468- |
| | | 129,270,751 | | ENSE00001148439- | 129,349,297 |
| | | | | ENSE00001148430 | |
| EX46 | ENSE00001148545 | 129,267,106- | INT46 | Intron | 129,349,385- |
| | | 129,267,219 | | ENSE00001148430- | 129,353,163 |
| | | | | ENSE00001148420 | |
| EX47 | ENSE00001148555 | 129,260,711- | INT47 | Intron | 129,353,358- |
| | | 129,260,822 | | ENSE00001148420- | 129,366,218 |
| | | | | ENSE00001148411 | |
| EX48 | ENSE00001148562 | 129,252,084- | INT48 | Intron | 129,366,362- |
| | | 129,252,295 | | ENSE00001148411- | 129,369,891 |
| | | | | ENSE00001148404 | |
| EX49 | ENSE00001148568 | 129,250,112- | INT49 | Intron | 129,369,991- |
| | | 129,250,213 | | ENSE00001148404- | 129,383,121 |
| | | | | ENSE00001148397 | |
| EX50 | ENSE00001148575 | 129,192,680- | INT50 | Intron | 129,383,234- |
| | | 129,192,853 | | ENSE00001148397- | 129,391,490 |
| | | | | ENSE00001148388 | |
| EX51 | ENSE00001148586 | 129,190,205- | INT51 | Intron | 129,391,654- |
| | | 129,190,345 | | ENSE00001148388- | 129,393,044 |
| | | | | ENSE00001148378 | |
| EX52 | ENSE00001148591 | 129,177,706- | INT52 | Intron | 129,393,256- |
| | | 129,177,866 | | ENSE00001148378- | 129,401,223 |
| | | | | ENSE00001148370 | |
| EX53 | ENSE00001148599 | 129,165,576- | INT53 | Intron | 129,401,341- |
| | | 129,165,675 | | ENSE00001148370- | 129,402,323 |
| | | | | ENSE00001148360 | |
| EX54 | ENSE00001148605 | 129,154,505- | INT54 | Intron | 129,402,488- |
| | | 129,154,683 | | ENSE00001148360- | 129,403,820 |
| | | | | ENSE00001148352 | |
| EX55 | ENSE00001148611 | 129,148,979- | INT55 | Intron | 129,403,960- |
| | | 129,149,096 | | ENSE00001148352- | 129,427,751 |
| | | | | ENSE00001148346 | |
| EX56 | ENSE00001148616 | 129,146,959- | INT56 | Intron | 129,427,855- |
| | | 129,147,048 | | ENSE00001148346- | 129,438,645 |
| | | | | ENSE00001148342 | |
| EX57 | ENSE00001148622 | 129,143,901- | INT57 | Intron | 129,438,763- |
| | | 129,144,080 | | ENSE00001148342- | 129,440,815 |
| | | | | ENSE00001148334 | |
| EX58 | ENSE00001148631 | 129,098,173- | INT58 | Intron | 129,440,999- |
| | | 129,098,415 | | ENSE00001148334- | 129,445,660 |
| | | | | ENSE00003729144 | |
| EX59 | ENSE00001148640 | 129,059,784- | INT59 | Intron | 129,440,999- |
| | | 129,059,896 | | ENSE00001148334- | 129,445,663 |
| | | | | ENSE00003724065 | |
| EX60 | ENSE00001148647 | 129,049,918- | INT60 | Intron | 129,440,999- |
| | | 129,050,088 | | ENSE00001148334- | 129,443,062 |
| | | | | ENSE00002502484 | |
| EX61 | ENSE00001816763 | 128,905,400- | INT61 | Intron | 129,445,822- |
| | | 128,905,580 | | ENSE00001148329- | 129,452,987 |
| | | | | ENSE00001148325 | |
| EX62 | ENSE00001852899 | 129,492,315- | INT62 | Intron | 129,453,132- |
| | | 129,492,450 | | ENSE00001148325- | 129,454,154 |
| | | | | ENSE00001148321 | |
| EX63 | ENSE00001872366 | 129,049,918- | INT63 | Intron | 129,454,289- |
| | | 129,049,981 | | ENSE00001148321- | 129,456,334 |
| | | | | ENSE00001148315 | |
| EX64 | ENSE00001874771 | 129,490,736- | INT64 | Intron | 129,456,495- |
| | | 129,490,795 | | ENSE00001148315- | 129,460,199 |
| | | | | ENSE00001148308 | |
| EX65 | ENSE00001878296 | 128,883,315- | INT65 | Intron | 129,460,325- |
| | | 128,883,357 | | ENSE00001148308- | 129,464,289 |
| | | | | ENSE00001148302 | |
| EX66 | ENSE00001891074 | 129,490,982- | INT66 | Intron | 129,464,453- |
| | | 129,491,079 | | ENSE00001148302- | 129,465,144 |
| | | | | ENSE00001148294 | |
| EX67 | ENSE00001943196 | 129,516,190- | INT67 | Intron | 129,465,290- |
| | | 129,516,569 | | ENSE00001148294- | 129,473,213 |
| | | | | ENSE00001148287 | |
| EX68 | ENSE00001954916 | 129,490,683- | INT68 | Intron | 129,473,353- |
| | | 129,490,795 | | ENSE00001148287- | 129,475,389 |
| | | | | ENSE00002503972 | |
| EX69 | ENSE00002497855 | 129,502,659- | INT69 | Intron | 129,473,353- |
| | | 129,502,672 | | ENSE00001148287- | 129,478,692 |
| | | | | ENSE00001148280 | |
| EX70 | ENSE00002502484 | 129,443,063- | INT70 | Intron | 129,478,814- |
| | | 129,443,068 | | ENSE00001148280- | 129,481,262 |
| | | | | ENSE00001148275 | |
| EX71 | ENSE00002503972 | 129,475,390- | INT71 | Intron | 129,481,440- |
| | | 129,475,401 | | ENSE00001148275- | 129,486,473 |
| | | | | ENSE00001148270 | |
| EX72 | ENSE00003535379 | 129,492,315- | INT72 | Intron | 129,486,623- |
| | | 129,492,483 | | ENSE00001148270- | 129,491,900 |
| | | | | ENSE00003611128 | |
| EX73 | ENSE00003610930 | 129,491,901- | INT73 | Intron | 129,502,772- |
| | | 129,492,077 | | ENSE00001148249- | 129,503,090 |
| | | | | ENSE00001148242 | |
| EX74 | ENSE00003611128 | 129,491,901- | INT74 | Intron | 129,503,281- |
| | | 129,492,077 | | ENSE00001148242- | 129,505,199 |
| | | | | ENSE00001148235 | |
| EX75 | ENSE00003643551 | 129,492,315- | INT75 | Intron | 129,505,356- |
| | | 129,492,483 | | ENSE00001148235- | 129,507,488 |
| | | | | ENSE00001148226 | |
| EX76 | ENSE00003723085 | 129,516,190- | INT76 | Intron | 129,507,643- |
| | | 129,516,563 | | ENSE00001148226- | 129,512,362 |
| | | | | ENSE00001148217 | |
| EX77 | ENSE00003724065 | 129,445,664- | INT77 | Intron | 129,512,494- |
| | | 129,445,821 | | ENSE00001148217- | 129,514,372 |
| | | | | ENSE00001148209 | |
| EX78 | ENSE00003729144 | 129,445,661- | INT78 | Intron | 129,514,596- |
| | | 129,445,821 | | ENSE00001148209- | 129,516,189 |
| | | | | ENSE00003723085 | |
| EX79 | ENSE00003732054 | 128,883,141- | INT79 | Intron | 129,514,596- |
| | | 128,883,357 | | ENSE00001148209- | 129,516,189 |
| | | | | ENSE00001943196 | |

[0376] Table 4 provides information on all of the transcripts for the LAMA2 gene based on the Ensembl database. Provided in Table 4 are the transcript ID from Ensembl and corresponding NCBI RefSeq ID for the transcript, the translation ID from Ensembl and the corresponding NCBI RefSeq ID for the protein, the biotype of the transcript sequence as classified by Ensembl and the exons and introns in the transcript based on the information in Table 3.

TABLE 4
Transcript Information for LAMA2

| | Transcript | | Protein | | | |
|---|---|---|---|---|---|---|
| | NCBI | | NCBI | Sequence | Exon ID from | Intron ID from |
| Transcript ID | RefSeq ID | Translation ID | RefSeq ID | Biotype | Table 3 | Table 3 |
| ENST00000421865.2 | NM_000426; | ENSP00000400365 | NP_000417; | Protein | EX1, EX2, EX3, | INT5, INT8, INT9, |
| | NM_001079823 | | NP_001073291 | coding | EX4, EX5, EX6, | INT10, INT13, |
| | | | | | EX7, EX8, EX9, | INT17, INT18, |
| | | | | | EX10, EX11, | INT19, INT20, |
| | | | | | EX12, EX13, | INT21, INT22, |
| | | | | | EX14, EX15, | INT23, INT24, |
| | | | | | EX16, EX17, | INT25. INT26, |
| | | | | | EX18, EX19, | INT27, INT28, |
| | | | | | EX20, EX21, | INT29, INT30, |
| | | | | | EX22, EX23, | INT31, INT32, |
| | | | | | EX24, EX25, | INT33, INT34, |
| | | | | | EX26, EX27, | INT35, INT36, |
| | | | | | EX28, EX29, | INT37, INT38, |
| | | | | | EX30, EX31, | INT39, INT40, |
| | | | | | EX32, EX33, | INT41, INT42, |
| | | | | | EX34, EX35, | INT43, INT44, |
| | | | | | EX36, EX37, | INT45, INT46, |
| | | | | | EX38, EX39, | INT47, INT48, |
| | | | | | EX40, EX41, | INT49, INT50, |
| | | | | | EX42, EX43, | INT51, INT52, |
| | | | | | EX44, EX45, | INT53, INT54, |
| | | | | | EX46, EX47, | INT55, INT56, |
| | | | | | EX48, EX49, | INT57, INT60, |
| | | | | | EX50, EX51, | INT61, INT62, |
| | | | | | EX52, EX53, | INT63, INT64, |
| | | | | | EX54, EX55, | INT65, INT66, |
| | | | | | EX56, EX57, | INT67, INT68, |
| | | | | | EX58, EX59, | INT70, INT71, |
| | | | | | EX60, EX67, | INT72, INT73, |
| | | | | | EX70, EX71, | INT74, INT75, |
| | | | | | EX72, EX74 | INT76, INT77, |
| | | | | | | INT79 |
| ENST00000618192.4 | — | ENSP00000480802 | — | Protein | EX2, EX3, EX4, | INTI, INT3, INT5, |
| | | | | coding | EX5, EX6, EX7, | INT8, INT9, INT17, |
| | | | | | EX8, EX9, EX10, | INT18, INT19, |
| | | | | | EX11, EX12, | INT20, INT21, |
| | | | | | EX13, EX14, | INT22, INT23, |
| | | | | | EX15, EX16, | INT24, INT25, |
| | | | | | EX17, EX19, | INT26, INT27, |
| | | | | | EX20, EX21, | INT28, INT29, |
| | | | | | EX22, EX23, | INT30, INT31, |
| | | | | | EX24, EX25, | INT32, INT33, |
| | | | | | EX26, EX27, | INT34, INT35, |
| | | | | | EX28, EX29, | INT36, INT37, |
| | | | | | EX30, EX31, | INT38, INT39, |
| | | | | | EX32, EX33, | INT40, INT41, |
| | | | | | EX34, EX35, | INT42, INT43, |
| | | | | | EX36, EX37, | INT44, INT45, |
| | | | | | EX38, EX39, | INT46, INT47, |
| | | | | | EX40, EX41, | INT48, INT49, |
| | | | | | EX42, EX43, | INT50, INT51, |
| | | | | | EX44, EX45, | INT52, INT53, |
| | | | | | EX46, EX47, | INT54, INT55, |
| | | | | | EX48, EX49, | INT56, INT57, |
| | | | | | EX50, EX51, | INT59, INT62, |
| | | | | | EX52, EX53, | INT63, INT64, |
| | | | | | EX54, EX55, | INT65, INT66, |
| | | | | | EX56, EX57, | INT67, INT68, |
| | | | | | EX58, EX59, | INT70, INT71, |
| | | | | | EX60, EX71, | INT72, INT73, |
| | | | | | EX72, EX74, | INT74, INT75, |
| | | | | | EX76, EX77, | INT76, INT77, |
| | | | | | EX79 | INT78 |
| ENST00000617695.4 | — | ENSP00000481744 | — | Protein | EX2, EX3, EX4, | INTI, INT2, INT5, |
| | | | | coding | EX5, EX6, EX7, | INT8, INT17, |
| | | | | | EX8, EX9, EX10, | INT18, INT19, |
| | | | | | EX11, EX12, | INT20, INT21, |
| | | | | | EX13, EX14, | INT22, INT23, |
| | | | | | EX15, EX16, | INT24, INT25, |
| | | | | | EX17, EX19, | INT26, INT27, |
| | | | | | EX20, EX21, | INT28, INT29, |
| | | | | | EX22, EX23, | INT30, INT31, |
| | | | | | EX24, EX25, | INT32, INT33, |
| | | | | | EX26, EX27, | INT34, INT35, |
| | | | | | EX28, EX29, | INT36, INT37, |
| | | | | | EX30, EX31, | INT38, INT39, |
| | | | | | EX32, EX33, | INT40, INT41, |
| | | | | | EX34, EX35, | INT42, INT43, |
| | | | | | EX36, EX37, | INT44, INT45, |
| | | | | | EX38, EX39, | INT46, INT47, |
| | | | | | EX40, EX41, | INT48, INT49, |
| | | | | | EX42, EX43, | INT50, INT51, |
| | | | | | EX44, EX45, | INT52, INT53, |
| | | | | | EX46, EX47, | INT54, INT55, |
| | | | | | EX48, EX49, | INT56, INT57, |
| | | | | | EX50, EX51, | INT58, INT62, |
| | | | | | EX52, EX53, | INT63, INT64, |
| | | | | | EX54, EX55, | INT65, INT66, |
| | | | | | EX56, EX57, | INT67, INT69, |
| | | | | | EX58, EX59, | INT70, INT71, |
| | | | | | EX60, EX72, | INT72, INT73, |
| | | | | | EX74, EX76, | INT74, INT75, |
| | | | | | EX78, EX79 | INT76, INT77, |
| | | | | | | INT78 |
| ENST00000498257.5 | — | — | — | Processed | EX66, EX68, | INT4, INT6, INT11, |
| | | | | transcript | EX69, EX73, | INT12 |
| | | | | | EX75 | |
| ENST00000494137.1 | — | — | — | Processed | EX62, EX64, | INT7, INT15 |
| | | | | transcript | EX73 | |
| ENST00000466230.1 | — | — | — | Processed | EX61, EX63, | INT14, INT16 |
| | | | | transcript | EX65 | |

[0377] LAMA2 has 31, 228 SNPs and the NCBI rs number and/or UniProt VAR number for this LAMA2 gene, rs2381, rs2384, rs50667, rs187851, rs190546, rs265325, rs265326, rs265327, rs265328, rs265329, rs265330, rs265331, rs265332, rs265333, rs265334, rs265335, rs265336, rs265337, rs265338, rs265339, rs265340, rs265341, rs265342, rs265343, rs265344, rs265345, rs265346, rs265347, rs265348, rs265349, rs265350, rs265351, rs265352, rs265353, rs265354, rs265355, rs265356, rs265357, rs265358, rs265359, rs265360, rs265361, rs265362, rs265363, rs265364, rs265365, rs265366, rs265367, rs265368, rs265369, rs265370, rs265371, rs265372, rs265373, rs265374, rs265375, rs265376, rs265377, rs265378, rs265379, rs265380, rs265381, rs265382, rs265383, rs265384, rs265385, rs265386, rs265387, rs265388, rs265389, rs265390, rs265391, rs265392, rs265393, rs265394, rs265395, rs265396, rs265397, rs265398, rs265399, rs265400, rs265401, rs265402, rs372608, rs375851, rs377258, rs396037, rs425671, rs426730, rs430241, rs434529, rs514236, rs727183, rs728348, rs737515, rs744909, rs883736, rs899350, rs899351, rs899352, rs899353, rs902368, rs902369, rs902370, rs902371, rs902372, rs902373, rs954161, rs967479, rs970064, rs988550, rs988551, rs990541, rs993637, rs995582, rs1002808, rs1015845, rs1015846, rs1026718, rs1027199, rs1027200, rs1032323, rs1032324, rs1063373, rs1140366, rs1336255, rs1336256, rs1382514, rs1382515, rs1387918, rs1414736, rs1414737, rs1414738, rs1414739, rs1414740, rs1414741, rs1472056, rs1472057, rs1478792, rs1478793, rs1478794, rs1478795, rs1478796, rs1478797, rs1478798, rs1478799, rs1478800, rs1478801, rs1478802, rs1478803, rs1478804, rs1478805, rs1478806, rs1478807, rs1478808, rs1478809, rs1490390, rs1490391, rs1490392, rs1490393, rs1542732, rs1811970, rs1842066, rs1844595, rs1844596, rs1844597, rs1871280, rs1873329, rs1873330, rs1873331, rs1889890, rs1889891, rs1889892, rs1904232, rs1948306, rs1948307, rs1961971, rs1963030, rs1979404, rs1986342, rs1994618, rs1994619, rs1994620, rs2017299, rs2068968, rs2087566, rs2101575, rs2127100, rs2127101, rs2127102, rs2130606, rs2130607, rs2152584, rs2169869, rs2169870, rs2219787, rs2229848, rs2229849, rs2229850, rs2230176, rs2244008, rs2275210, rs2275211, rs2275212, rs2275213, rs2275214, rs2279165, rs2297738, rs2297741, rs2297742, rs2306220, rs2306942, rs2326757, rs2326758, rs2326759, rs2326760, rs2326761, rs2326794, rs2326795, rs2326796, rs2326797, rs2326798, rs2326799, rs2326800, rs2326801, rs2326802, rs2326803, rs2326804, rs2326805, rs2326816, rs2326817, rs2326818, rs2326819, rs2326820, rs2326821, rs2326822, rs2437082, rs2437083, rs2437084, rs2437085, rs2437086, rs2437087, rs2437088, rs2437089, rs2437090, rs2437091, rs2437092, rs2437093, rs2437094, rs2437095, rs2437096, rs2437097, rs2437098, rs2437099, rs2448011, rs2448012, rs2448013, rs2451676, rs2451677, rs2451678, rs2451679, rs2451680, rs2451681, rs2451682, rs2451683, rs2451686, rs2451687, rs2451688, rs2451689, rs2451690, rs2494575, rs2494576, rs2494577, rs2494579, rs2494580, rs2494581, rs2494582, rs2494583, rs2494584, rs2494585, rs2494586, rs2494935, rs2494936, rs2494937, rs2501458, rs2501459, rs2501460, rs2501461, rs2501463, rs2501464, rs2501465, rs2501466, rs2501467, rs2501468, rs2501469, rs2571577, rs2571578, rs2571579, rs2571580, rs2571581, rs2571582, rs2571583, rs2571584, rs2571585, rs2571586, rs2571587, rs2571592, rs2571593, rs2571594, rs2784889, rs2784891, rs2784892, rs2784893, rs2784894, rs2784895, rs2784896, rs2784897, rs2784898, rs2784899, rs2784900, rs2784901, rs2784902, rs2784903, rs2784904, rs2784905, rs2784906, rs2784907, rs2784908, rs2876021, rs2876038, rs2876041, rs2927882, rs3061201, rs3062303, rs3062320, rs3062342, rs3062359, rs3062363, rs3189618, rs3215022, rs3734387, rs3736077, rs3749877, rs3749878, rs3749879, rs3749880, rs3749881, rs3778112, rs3778114, rs3778119, rs3778121, rs3778122, rs3778123, rs3778124, rs3778125, rs3778126, rs3778129, rs3778130, rs3778131, rs3778132, rs3778133, rs3778134, rs3778135, rs3778136, rs3778137, rs3778138, rs3778139, rs3778140, rs3778141, rs3778142, rs3798660, rs3798662, rs3798663, rs3798664, rs3798666, rs3798668, rs3798674, rs3813367, rs3813368, rs3813369, rs3813370, rs3816665, rs3816666, rs3823006, rs3823007, rs3823008, rs3828735, rs3828736, rs3828737, rs3836994, rs3836995, rs3836996, rs3839400, rs3839401, rs3839402, rs3839403, rs3839404, rs3839405, rs3839406, rs3841288, rs3935350, rs3935856, rs3943300, rs4053195, rs4053204, rs4053207, rs4076090, rs4080725, rs4080726, rs4124421, rs4124422, rs4124423, rs4143548, rs4143749, rs4143750, rs4143751, rs4143752, rs4143753, rs4144419, rs4144420, rs4243497, rs4243498, rs4243499, rs4257879, rs4260765, rs4262207, rs4265052, rs4273713, rs4280978, rs4285344, rs4285345, rs4289675, rs4291116, rs4292545, rs4295506, rs4296900, rs4298368, rs4304193, rs4305743, rs4316028, rs4317429, rs4320393, rs4323331, rs4327720, rs4330550, rs4337952, rs4337953, rs4345416, rs4349827, rs4354176, rs4364505, rs4367397, rs4368832, rs4368833, rs4370390, rs4377807, rs4392741, rs4397244, rs4397250, rs4397251, rs4397252, rs4398767, rs4404787, rs4406255, rs4406256, rs4406257, rs4416691, rs4418211, rs4419681, rs4424111, rs4432990, rs4438974, rs4443524, rs4449651, rs4452666, rs4452667, rs4454157, rs4458709, rs4469321, rs4475345, rs4489171, rs4490684, rs4510700, rs4510701, rs4512239, rs4515402, rs4515405, rs4520028, rs4521616, rs4523106, rs4523108, rs4524626, rs4530883, rs4532463, rs4534007, rs4538727, rs4541768, rs4541769, rs4543385, rs4551189, rs4551190, rs4552747, rs4555933, rs4562158, rs4562164, rs4563739, rs4568475, rs4569989, rs4571591, rs4576277, rs4580897, rs4585575, rs4585583, rs4590284, rs4591878, rs4594973, rs4596506, rs4599676, rs4599677, rs4599678, rs4612192, rs4612193, rs4617014, rs4629708, rs4642505, rs4895840, rs4895841, rs4895842, rs4895843, rs4895844, rs4895846, rs4897281, rs4897282, rs4897283, rs4897284, rs4897285, rs4897286, rs4897287, rs4897289, rs4897290, rs4897291, rs4897292, rs4897293, rs4897295, rs4897296, rs4897297, rs4897298, rs4897299, rs4897301, rs4897303, rs4897304, rs4897306, rs4897307, rs4897308, rs4897309, rs4897310, rs4897311, rs4897312, rs4897313, rs4897314, rs4897315, rs4897316, rs4897317, rs4897318, rs4897321, rs4897322, rs4897323, rs4897324, rs4897325, rs4897326, rs4897327, rs4897328, rs4997856, rs5002295, rs5010350, rs5029371, rs5029830, rs5879914, rs5879915, rs5879916, rs5879917, rs5879918, rs5879920, rs5879922, rs5879923, rs5879924, rs5879925, rs5879926, rs5879928, rs5879929, rs5879930, rs5879934, rs5879937, rs5879938, rs5879940, rs5879941, rs5879942, rs5879943, rs5879945, rs5879946, rs5879948, rs5879949, rs6149801, rs6420741, rs6420742, rs6569571, rs6569573, rs6569574, rs6569575, rs6569576, rs6569577, rs6569578, rs6569579, rs6569580, rs6569581, rs6569582, rs6569583, rs6569584, rs6569585, rs6569586, rs6569588, rs6569589, rs6569593, rs6569600, rs6569601, rs6569602, rs6569603, rs6569604, rs6899448, rs6899685, rs6899741, rs6899815, rs6900119, rs6900123, rs6900181, rs6900645, rs6902375, rs6902480, rs6902612, rs6902957, rs6903654, rs6904476, rs6904629, rs6904763, rs6904911, rs6905196, rs6905378, rs6905693, rs6905843, rs6906203, rs6906791, rs6906869, rs6906956, rs6907073, rs6907271, rs6907500, rs6907984, rs6907994, rs6908321, rs6908451, rs6908604, rs6909374, rs6909611, rs6909694, rs6910113, rs6910290, rs6911075, rs6911296, rs6911685, rs6912590, rs6912990, rs6913063, rs6913703, rs6913749, rs6914003, rs6914113, rs6914469, rs6914652, rs6914657, rs6914675, rs6915788, rs6915817, rs6917043, rs6917532, rs6917956, rs6917970, rs6917996, rs6919209, rs6919352, rs6920374, rs6921064, rs6921593, rs6921635, rs6922375, rs6922401, rs6922430, rs6922493, rs6922936, rs6922953, rs6923140, rs6923141, rs6923268, rs6923376, rs6923411, rs6925197, rs6926104, rs6926420, rs6926812, rs6928030, rs6928626, rs6928642, rs6928733, rs6928963, rs6929916, rs6930242, rs6930250, rs6930568, rs6930649, rs6930685, rs6930710, rs6930839, rs6931173, rs6932090, rs6933608, rs6933830, rs6933843, rs6933947, rs6933974, rs6934624, rs6936161, rs6936443, rs6936526, rs6936767, rs6936981, rs6937209, rs6937415, rs6937948, rs6938221, rs6938402, rs6938507, rs6938812, rs6938825, rs6939168, rs6940025, rs6941264, rs6941438, rs6941675, rs6941938, rs6942266, rs7341286, rs7356971, rs7356972, rs7357064, rs7381463, rs7449534, rs7449787, rs7450830, rs7450859, rs7450865, rs7450882, rs7450969, rs7450990, rs7451237, rs7451592, rs7452491, rs7453080, rs7453530, rs7453910, rs7454005, rs7454110, rs7454382, rs7738059, rs7738096, rs7738133, rs7738171, rs7738316, rs7738438, rs7738519, rs7738996, rs7739173, rs7739194, rs7739528, rs7739841, rs7740029, rs7740312, rs7740321, rs7740552, rs7740749, rs7741016, rs7741035, rs7741435, rs7741523, rs7741538, rs7741948, rs7741996, rs7742673, rs7744609, rs7744826, rs7745096, rs7745354, rs7745842, rs7745957, rs7747034, rs7748051, rs7748531, rs7748682, rs7748719, rs7748864, rs7748901, rs7749156, rs7749177, rs7749949, rs7750128, rs7750261, rs7750276, rs7750304, rs7750354, rs7750547, rs7751045, rs7751105, rs7751112, rs7751121, rs7751469, rs7751571, rs7751685, rs7752897, rs7753018, rs7753179, rs7753331, rs7753650, rs7753862, rs7754186, rs7754537, rs7754560, rs7754620, rs7754666, rs7754894, rs7755187, rs7755240, rs7755258, rs7755729, rs7755813, rs7756786, rs7756862, rs7756981, rs7757097, rs7757326, rs7758064, rs7758182, rs7758291, rs7758505, rs7758532, rs7758642, rs7758663, rs7759703, rs7760596, rs7761156, rs7761165, rs7761275, rs7762050, rs7762236, rs7762517, rs7762560, rs7762690, rs7763317, rs7763380, rs7763969, rs7763974, rs7764094, rs7764165, rs7764177, rs7764300, rs7764746, rs7764806, rs7764858, rs7765186, rs7765865, rs7766111, rs7766548, rs7766689, rs7766742, rs7766816, rs7766916, rs7767161, rs7767324, rs7767607, rs7767990, rs7768567, rs7768702, rs7768908, rs7769289, rs7769389, rs7769517, rs7769673, rs7769749, rs7770018, rs7770135, rs7770270, rs7771055, rs7771065, rs7771079, rs7771363, rs7771364, rs7771688, rs7771807, rs7771864, rs7772004, rs7772072, rs7772100, rs7772780, rs7772939, rs7773094, rs7773511, rs7773589, rs7773602, rs7773869, rs7774472, rs7774482, rs7774641, rs7774774, rs7774922, rs7774986, rs7774997, rs7775027, rs7775030, rs7775367, rs7775665, rs7776116, rs9285464, rs9285465, rs9321138, rs9321139, rs9321140, rs9321141, rs9321142, rs9321143, rs9321144, rs9321145, rs9321146, rs9321148, rs9321149, rs9321150, rs9321151, rs9321152, rs9321153, rs9321154, rs9321155, rs9321156, rs9321157, rs9321158, rs9321159, rs9321160, rs9321162, rs9321163, rs9321164, rs9321165, rs9321166, rs9321167, rs9321168, rs9321169, rs9321170, rs9372910, rs9372912, rs9372913, rs9372914, rs9372915, rs9372916, rs9372917, rs9372918, rs9372919, rs9372920, rs9372922, rs9372923, rs9372924, rs9372925, rs9372926, rs9372927, rs9372928, rs9372929, rs9372930, rs9372932, rs9372933, rs9372934, rs9372935, rs9372936, rs9375602, rs9375603, rs9375605, rs9375606, rs9375607, rs9375608, rs9375609, rs9375610, rs9375611, rs9375612, rs9375613, rs9375614, rs9375615, rs9375616, rs9375617, rs9375618, rs9375619, rs9375621, rs9375622, rs9375623, rs9375624, rs9375625, rs9375626, rs9375627, rs9375628, rs9375629, rs9375630, rs9375631, rs9375632, rs9385476, rs9385477, rs9385478, rs9385479, rs9385481, rs9385482, rs9385483, rs9385484, rs9385485, rs9385486, rs9385487, rs9385488, rs9385489, rs9385490, rs9385491, rs9385492, rs9385495, rs9388669, rs9388670, rs9388671, rs9388672, rs9388673, rs9388674, rs9388675, rs9388677, rs9388678, rs9388679, rs9388680, rs9388681, rs9388682, rs9388683, rs9388684, rs9388685, rs9388686, rs9388687, rs9388688, rs9388692, rs9388693, rs9388694, rs9388695, rs9388696, rs9388699, rs9388700, rs9388701, rs9388703, rs9388704, rs9388705, rs9388706, rs9388707, rs9388708, rs9388709, rs9398888, rs9398889, rs9398890, rs9398891, rs9398892, rs9398893, rs9398894, rs9398895, rs9398898, rs9398899, rs9398900, rs9398901, rs9398902, rs9398903, rs9398905, rs9402087, rs9402088, rs9402089, rs9402090, rs9402091, rs9402092, rs9402093, rs9402094, rs9402095, rs9402096, rs9402097, rs9402098, rs9402099, rs9402100, rs9402101, rs9402102, rs9402103, rs9402104, rs9402105, rs9402106, rs9402107, rs9402109, rs9402115, rs9402116, rs9402117, rs9402118, rs9402119, rs9402120, rs9402121, rs9402122, rs9402123, rs9402124, rs9402125, rs9402126, rs9402127, rs9402128, rs9402129, rs9402130, rs9402131, rs9402132, rs9402133, rs9402134, rs9402135, rs9402136, rs9402137, rs9482950, rs9482951, rs9482952, rs9482953, rs9482954, rs9482955, rs9482956, rs9482957, rs9482959, rs9482960, rs9482961, rs9482962, rs9482963, rs9482964, rs9482965, rs9482966, rs9482967, rs9482968, rs9482969, rs9482970, rs9482971, rs9482972, rs9482973, rs9482975, rs9482976, rs9482977, rs9482978, rs9482979, rs9482980, rs9482981, rs9482982, rs9482983, rs9482984, rs9482985, rs9482986, rs9482987, rs9482988, rs9482989, rs9482990, rs9482991, rs9482992, rs9482994, rs9482995, rs9482997, rs9482998, rs9482999, rs9483000, rs9483001, rs9483002, rs9483003, rs9483006, rs9483008, rs9483009, rs9483010, rs9483011, rs9483012, rs9483013, rs9483014, rs9483016, rs9483017, rs9483018, rs9483019, rs9483020, rs9483021, rs9483022, rs9483023, rs9483024, rs9483025, rs9483026, rs9483027, rs9483028, rs9483029, rs9483031, rs9483032, rs9483033, rs9483034, rs9483035, rs9483036, rs9483037, rs9483038, rs9492133, rs9492135, rs9492136, rs9492137, rs9492139, rs9492140, rs9492142, rs9492143, rs9492144, rs9492145, rs9492146, rs9492147, rs9492148, rs9492149, rs9492150, rs9492151, rs9492152, rs9492153, rs9492154, rs9492155, rs9492156, rs9492157, rs9492158, rs9492159, rs9492160, rs9492161, rs9492162, rs9492163, rs9492164, rs9492165, rs9492166, rs9492167, rs9492168, rs9492169, rs9492170, rs9492171, rs9492172, rs9492173, rs9492174, rs9492175, rs9492176, rs9492177, rs9492178, rs9492179, rs9492180, rs9492181, rs9492182, rs9492183, rs9492184, rs9492185, rs9492186, rs9492187, rs9492188, rs9492189, rs9492190, rs9492191, rs9492192, rs9492193, rs9492194, rs9492195, rs9492196, rs9492197, rs9492198, rs9492199, rs9492200, rs9492201, rs9492202, rs9492203, rs9492204, rs9492205, rs9492206, rs9492207, rs9492208, rs9492209, rs9492210, rs9492211, rs9492212, rs9492213, rs9492214, rs9492215, rs9492216, rs9492217, rs9492218, rs9492219, rs9492221, rs9492222, rs9492223, rs9492224, rs9492225, rs9492226, rs9492227, rs9492228, rs9492229, rs9492231, rs9492232, rs9492233, rs9492234, rs9492235, rs9492237, rs9492238, rs9492240, rs9492241, rs9492242, rs9492243, rs9492244, rs9492245, rs9492246, rs9492247, rs9492248, rs9492249, rs9492253, rs9492254, rs9492255, rs9492256, rs9492257, rs9492258, rs9492259, rs9492260, rs9492261, rs9492262, rs9492263, rs9492264, rs9492265, rs9492266, rs9492267, rs9492268, rs9492269, rs9492270, rs9492271, rs9492272, rs9492273, rs9492279, rs9492280, rs9492281, rs9492282, rs9492283, rs9492284, rs9492285, rs9492286, rs9492287, rs9492288, rs9492289, rs9492290, rs9492291, rs9492292, rs9492293, rs9492294, rs9492295, rs9492296, rs9492297, rs9492298, rs9492299, rs9492301, rs9492302, rs9492303, rs9492304, rs9492305, rs9492307, rs9492308, rs9492309, rs9492310, rs9492311, rs9492312, rs9492313, rs9492314, rs9492315, rs9492316, rs9492317, rs9492318, rs9492319, rs9492320, rs9492322, rs9492323, rs9492324, rs9492325, rs9492329, rs9492330, rs9492331, rs9492332, rs9492333, rs9688764, rs9688992, rs9689333, rs9689584, rs9689594, rs9721624, rs9767587, rs9791341, rs9791352, rs9885712, rs9885790, rs9986606, rs9986669, rs10080633, rs10080659, rs10080661, rs10155762, rs10214452, rs10214572, rs10214920, rs10223591, rs10223887, rs10447440, rs10456974, rs10456975, rs10456976, rs10456977, rs10456978, rs10456979, rs10456980, rs10456981, rs10457513, rs10457514, rs10457515, rs10457516, rs10457517, rs10457518, rs10457520, rs10457521, rs10457522, rs10457523, rs10499143, rs10499144, rs10499145, rs10499146, rs10499147, rs10499148, rs10499149, rs10499150, rs10499151, rs10499152, rs10499153, rs10499154, rs10499155, rs10499156, rs10499157, rs10499158, rs10499159, rs10499160, rs10522614, rs10531256, rs10532240, rs10534364, rs10551797, rs10553801, rs10556188, rs10564558, rs10586725, rs10588066, rs10590805, rs10598266, rs10616348, rs10631784, rs10644178, rs10647857, rs10648375, rs10652900, rs10655632, rs10661856, rs10683395, rs10686168, rs10696229, rs10711821, rs10713380, rs10872339, rs10872340, rs10872341, rs10872342, rs10872343, rs11154449, rs11154450, rs11154459, rs11154461, rs11154462, rs11154463, rs11154464, rs11154466, rs11154470, rs11154471, rs11154472, rs11154473, rs11154474, rs11154475, rs11154477, rs11154478, rs11154479, rs11154480, rs11154481, rs11154482, rs11270179, rs11273557, rs11287525, rs11288751, rs11310961, rs11311579, rs11315443, rs11321173, rs11321357, rs11335861, rs11342050, rs11351708, rs11369774, rs11369775, rs11154458, rs11154457, rs11154456, rs11154455, rs11154454, rs11154452, rs11154451, rs11380655, rs11386466, rs11387698, rs11389653, rs11412959, rs11423987, rs11425031, rs11432436, rs11436520, rs11443015, rs11451312, rs11451502, rs11751222, rs11751534, rs11751751, rs11752437, rs11752846, rs11753445, rs11754225, rs11754670, rs11756052, rs11756481, rs11757127, rs11757146, rs11757516, rs11758111, rs11758207, rs11759184, rs11759957, rs11961191, rs11961288, rs11961290, rs11961308, rs11961329, rs11961488, rs11961514, rs11961517, rs11961763, rs11961868, rs11962075, rs11962584, rs11962799, rs11963232, rs11963257, rs11963260, rs11963264, rs11963278, rs11963584, rs11963652, rs11964027, rs11964368, rs11964429, rs11964497, rs11965299, rs11965687, rs11965729, rs11965876, rs11966151, rs11966152, rs11966288, rs11966354, rs11966453, rs11966599, rs11967042, rs11967708, rs11968129, rs11968133, rs11968323, rs11968519, rs11969640, rs11969657, rs11969799, rs11969817, rs11970349, rs11970706, rs11970719, rs12055743, rs12111018, rs12111102, rs12111155, rs12111458, rs12153813, rs12154065, rs12174440, rs12174601, rs12174829, rs12175446, rs12190405, rs12190427, rs12190465, rs12190889, rs12191019, rs12191134, rs12191417, rs12191680, rs12191829, rs12191840, rs12192258, rs12192806, rs12193092, rs12193437, rs12193446, rs12193469, rs12193898, rs12195064, rs12195178, rs12195187, rs12195889, rs12197184, rs12197360, rs12197539, rs12198530, rs12198534, rs12198871, rs12199373, rs12199446, rs12199493, rs12199639, rs12200538, rs12200672, rs12200836, rs12201361, rs12201387, rs12201645, rs12201738, rs12201849, rs12202008, rs12202078, rs12202114, rs12202444, rs12202461, rs12203042, rs12204159, rs12204350, rs12204632, rs12204661, rs12204924, rs12205913, rs12205965, rs12206081, rs12206166, rs12206487, rs12206708, rs12211951, rs12211988, rs12213554, rs12213754, rs12214178, rs12214548, rs12215631, rs12215657, rs12215704, rs12215981, rs12332809, rs12332811, rs12332864, rs12333077, rs12523912, rs12523994, rs12524579, rs12525156, rs12526520, rs12526526, rs12527130, rs12527452, rs12527704, rs12529278, rs12529928, rs12530129, rs12530139, rs12660510, rs12661540, rs12661643, rs12661905, rs12661965, rs12209961, rs12209079, rs12209058, rs12208997, rs12208614, rs12208401, rs12208392, rs12208367, rs12208190, rs12208111, rs12207812, rs12207758, rs12206958, rs12211909, rs12211746, rs12211745, rs12211698, rs12211599, rs12211283, rs12210785, rs12210742, rs12210627, rs12210504, rs12210105, rs12210013, rs12209995, rs12209976, rs12662729, rs12663088, rs12663142, rs12663564, rs12663723, rs12664025, rs12664177, rs12664291, rs12664348, rs12664470, rs12664813, rs12664847, rs12665278, rs12665475, rs12665785, rs13190889, rs13191561, rs13191850, rs13192715, rs13193267, rs13193268, rs13193269, rs13193413, rs13193460, rs13193468, rs13193684, rs13193921, rs13193941, rs13194404, rs13194587, rs13194622, rs13194657, rs13194751, rs13194964, rs13194969, rs13195595, rs13195637, rs13195646, rs13195988, rs13196461, rs13197475, rs13197510, rs13197598, rs13197614, rs13197787, rs13198457, rs13198867, rs13199704, rs13200086, rs13200168, rs13200283, rs13201013, rs13201069, rs13202296, rs13202815, rs13202820, rs13203042, rs13203145, rs13203570, rs13204236, rs13204384, rs13205730, rs13206081, rs13206325, rs13206942, rs13207203, rs13208140, rs13208540, rs13209032, rs13209039, rs13209086, rs13209216, rs13209300, rs13209796, rs13210076, rs13210624, rs13210824, rs13210852, rs13210965, rs13211053, rs13211700, rs13212294, rs13213076, rs13213893, rs13214058, rs13214641, rs13215337, rs13215350, rs13215475, rs13215478, rs13215484, rs13215485, rs13215490, rs13215607, rs13215669, rs13215698, rs13215801, rs13216227, rs13216343, rs13216380, rs13216682, rs13216843, rs13217124, rs13217568, rs13217681, rs13217768, rs13217885, rs13217957, rs13217991, rs13218494, rs13219139, rs13219991, rs13437018, rs13437419, rs17053356, rs17056726, rs17056731, rs17056776, rs17056792, rs17056793, rs17056798, rs17056825, rs17056827, rs17056847, rs17056860, rs17056862, rs17056866, rs17056868, rs17056871, rs17056873, rs17056875, rs17056876, rs17056894, rs17056909, rs17056914, rs17056928, rs17056935, rs17056940, rs17056942, rs17057029, rs17057083, rs17057086, rs17057149, rs17057158, rs17057159, rs17057176, rs17057184, rs17057193, rs17057200, rs17057220, rs17057233, rs17057244, rs17057251, rs17057259, rs17057338, rs17057448, rs17057464, rs17057468, rs17090779, rs17722934, rs17723027, rs17723068, rs17723217, rs17723635, rs17723677, rs17723940, rs17724256, rs17725127, rs17727238, rs17728853, rs17729067, rs17729201, rs17729268, rs17740726, rs17741197, rs17741401, rs17741922, rs17742838, rs17743386, rs17752001, rs17752721, rs17779264, rs17779657, rs17779977, rs17780567, rs17780950, rs17782500, rs17783485, rs17796969, rs17799083, rs17799606, rs28368902, rs28384270, rs28385612, rs28419053, rs28449311, rs28457821, rs28475739, rs28476675, rs28485035, rs28499898, rs28513079, rs28523429, rs28532465, rs28538123, rs28548380, rs28555393, rs28563826, rs28575537, rs28583518, rs28595321, rs28612262, rs28615849, rs28627666, rs28653772, rs28655649, rs28658417, rs28662156, rs28679813, rs28688353, rs28693972, rs28709643, rs28713374, rs28744404, rs28768378, rs28782788, rs28787600, rs28799311, rs28814660, rs28815524, rs28829331, rs28872529, rs28873838, rs28895916, rs33980213, rs33988321, rs34009483, rs34012718, rs34016539, rs34032205, rs34036977, rs34045942, rs34058798, rs34087506, rs34102100, rs34119452, rs34123954, rs34133583, rs34135555, rs34136592, rs34155575, rs34156298, rs34156628, rs34164639, rs34171601, rs34179503, rs34180583, rs34197562, rs34215442, rs34217509, rs34224033, rs34234686, rs34237979, rs34242051, rs34258391, rs34264921, rs34273896, rs34290079, rs34290387, rs34293560, rs34301117, rs34302582, rs34305119, rs34307331, rs34316100, rs34326999, rs34328979, rs34333485, rs34334168, rs34334697, rs34347699, rs34353558, rs34367843, rs34381192, rs34385255, rs34400271, rs34401836, rs34406632, rs34407456, rs34410693, rs34423854, rs34426019, rs34436703, rs34458683, rs34458869, rs34458994, rs34466115, rs34475617, rs34482742, rs34484800, rs34486848, rs34487290, rs34492863, rs34499919, rs34505698, rs34514698, rs34520790, rs34524516, rs34541678, rs34548709, rs34550827, rs34559724, rs34567879, rs34573140, rs34573345, rs34590713, rs34598090, rs34617619, rs34618909, rs34626007, rs34626728, rs34638306, rs34639385, rs34639661, rs34640105, rs34645133, rs34649935, rs34662601, rs34674781, rs34681874, rs34699717, rs34707638, rs34719000, rs34727721, rs34734505, rs34734582, rs34769004, rs34787140, rs34797557, rs34804292, rs34805871, rs34820323, rs34822697, rs34823745, rs34853171, rs34859670, rs34862870, rs34869004, rs34869588, rs34874182, rs34876927, rs34879436, rs34908539, rs34924276, rs34925160, rs34937436, rs34940887, rs34944695, rs34953233, rs34957196, rs34963183, rs34967393, rs34975000, rs34980992, rs34988037, rs34993873, rs34995060, rs34997144, rs35018815, rs35034126, rs35047362, rs35055047, rs35065563, rs35075192, rs35089085, rs35092331, rs35108091, rs35110963, rs35128967, rs35131309, rs35156668, rs35170735, rs35174059, rs35176345, rs35181137, rs35182535, rs35183205, rs35197861, rs35200109, rs35206967, rs35211057, rs35215712, rs35218992, rs35228622, rs35235056, rs35237074, rs35238808, rs35247924, rs35256495, rs35258572, rs35261321, rs35277491, rs35277808, rs35283881, rs35284161, rs35295180, rs35308300, rs35313209, rs35321076, rs35321995, rs35339584, rs35346751, rs35351239, rs35358238, rs35369168, rs35383404, rs35385823, rs35390792, rs35397253, rs35407317, rs35407431, rs35412094, rs35420301, rs35429229, rs35429465, rs35438607, rs35449532, rs35465621, rs35468419, rs35471925, rs35498014, rs35536094, rs35570404, rs35576057, rs35579821, rs35581247, rs35616004, rs35617785, rs35625465, rs35637567, rs35639463, rs35640234, rs35645765, rs35660711, rs35666344, rs35667186, rs35669892, rs35671400, rs35679917, rs35685785, rs35690225, rs35693736, rs35694054, rs35704827, rs35710790, rs35713205, rs35714302, rs35728646, rs35736753, rs35737747, rs35739184, rs35750813, rs35757125, rs35764921, rs35766986, rs35770511, rs35770637, rs35775343, rs35778422, rs35784986, rs35789281, rs35793323, rs35797510, rs35806357, rs35811463, rs35814171, rs35822226, rs35826274, rs35827446, rs35830382, rs35848625, rs35855073, rs35861299, rs35867085, rs35875341, rs35877385, rs35878556, rs35879899, rs35883067, rs35889149, rs35893565, rs35919010, rs35924441, rs35931357, rs35943427, rs36123101, rs36203052, rs41285286, rs41285288, rs41369446, rs41500045, rs41524649, rs55667333, rs55703717, rs55706707, rs55729430, rs55736413, rs55737366, rs55748488, rs55774221, rs55797551, rs55804366, rs55813773, rs55814473, rs55824748, rs55835842, rs55851222, rs55860505, rs55880003, rs55881637, rs55882567, rs55893989, rs55906092, rs55910907, rs55920205, rs55939571, rs55950318, rs36119558, rs36114041, rs36101820, rs36094541, rs36093289, rs36076993, rs36062625, rs36061449, rs36054779, rs36044314, rs36035388, rs36031614, rs36027308, rs36026646, rs36020550, rs36019058, rs36004394, rs35993036, rs35984798, rs35971504, rs35969474, rs35955704, rs35955136, rs35951571, rs55958652, rs55983801, rs56000744, rs56005089, rs56016234, rs56023064, rs56030305, rs56030366, rs56033684, rs56035053, rs56038001, rs56056014, rs56056339, rs56066662, rs56071389, rs56077289, rs56080127, rs56080655, rs56104504, rs56125261, rs56131806, rs56138778, rs56146447, rs56161950, rs56172331, rs56173620, rs56177877, rs56209254, rs56209257, rs56209536, rs56224815, rs56267114, rs56286736, rs56290964, rs56292877, rs56318431, rs56328498, rs56344948, rs56355066, rs56355320, rs56365539, rs56371597, rs56373437, rs56382803, rs56386210, rs56387145, rs56397403, rs56397435, rs56413969, rs56669513, rs56672387, rs56673184, rs56691264, rs56709218, rs56718060, rs56737821, rs56778619, rs56799743, rs56800288, rs56828153, rs56870151, rs56886938, rs56903827, rs62020483, rs61705472, rs61631334, rs61630710, rs61620549, rs61578868, rs61577558, rs61533321, rs61511648, rs61478478, rs61413526, rs61312186, rs61306505, rs61244248, rs61183430, rs61163834, rs61138223, rs61119913, rs61095143, rs61078343, rs61075616, rs61059083, rs61014931, rs60953787, rs60904661, rs60889724, rs60889496, rs60878641, rs60844621, rs60808123, rs60805887, rs60800781, rs60791868, rs60710334, rs60701082, rs60672105, rs60664204, rs60562061, rs60557298, rs60517505, rs60430895, rs60378592, rs60369204, rs60365132, rs60220768, rs60220578, rs60208264, rs60202121, rs60169885, rs60077511, rs60077388, rs60050861, rs59983918, rs59956392, rs59928168, rs59921130, rs59883596, rs59865180, rs59840505, rs59749829, rs59724751, rs59721628, rs59707849, rs59699870, rs59649545, rs59598192, rs59596900, rs59555377, rs59547307, rs59543848, rs59535638, rs59511658, rs59508400, rs59504944, rs59500958, rs59482767, rs59450971, rs59390331, rs59369709, rs59357326, rs59342532, rs59319869, rs59259965, rs59251424, rs59230455, rs59195800, rs59174664, rs59153423, rs59063850, rs59038232, rs59031722, rs58958022, rs58925003, rs58858833, rs58827899, rs58822663, rs58821164, rs58772123, rs58757612, rs58719322, rs58713330, rs58659199, rs58656243, rs58649710, rs58615942, rs58611312, rs58564339, rs58558234, rs58464758, rs58456778, rs58456073, rs58432903, rs58421460, rs58404894, rs58375148, rs58364321, rs58347039, rs58286852, rs58262242, rs58220551, rs58217637, rs58190979, rs58171173, rs58162882, rs58160199, rs58151346, rs58131786, rs58107657, rs58043974, rs58022382, rs58006653, rs57996601, rs57994127, rs57968758, rs57967776, rs57921439, rs57907508, rs57884541, rs57876406, rs57850767, rs57842495, rs57807123, rs57738384, rs57713069, rs57708941, rs57696357, rs57666672, rs57666307, rs57653327, rs57515237, rs57485011, rs57454042, rs57450570, rs57443722, rs57420975, rs57398416, rs57359210, rs57356717, rs57319675, rs57299404, rs57290480, rs57224668, rs57202885, rs57184336, rs57180629, rs57169956, rs57146140, rs57110426, rs57087994, rs57086507, rs57072570, rs57066084, rs57029914, rs57017144, rs57008513, rs56979094, rs56978194, rs56977322, rs56972149, rs56970619, rs56962805, rs56929613, rs56920166, rs62420960, rs62420961, rs62420962, rs62420963, rs62420964, rs62420977, rs62420979, rs62420980, rs62420982, rs62420983, rs62420984, rs62420985, rs62420986, rs62420993, rs62420994, rs62420995, rs62420996, rs62421006, rs62421007, rs62421008, rs62421009, rs62421010, rs62421011, rs62421012, rs62421013, rs62421014, rs62421015, rs62421016, rs62421017, rs62421032, rs62421033, rs62421034, rs62421036, rs62422166, rs62422167, rs62423270, rs62423271, rs62423273, rs62423274, rs62423275, rs62423276, rs62425957, rs62425959, rs62428461, rs62428462, rs62428463, rs62428476, rs62428477, rs62428479, rs62428481, rs62428482, rs62956060, rs66474311, rs66476613, rs66495768, rs66496825, rs66497175, rs66500429, rs66514944, rs66522065, rs66539661, rs66598335, rs66599064, rs66620338, rs66667236, rs66716618, rs66739459, rs66742444, rs66805881, rs66806176, rs66827570, rs66851688, rs66922212, rs66959221, rs66964687, rs66966156, rs66972531, rs67033723, rs67051537, rs67113040, rs67181842, rs67207972, rs67273006, rs67361285, rs67365009, rs67392956, rs67393504, rs67480579, rs67500541, rs67521657, rs67540753, rs67561065, rs67600112, rs67603776, rs67630582, rs67677394, rs67741467, rs67747443, rs67832726, rs67839131, rs67846041, rs67882436, rs67885605, rs67900452, rs67934141, rs67952936, rs67979397, rs68013712, rs68014645, rs68082585, rs68083303, rs68089713, rs68101736, rs68128275, rs68130764, rs68140510, rs68157972, rs71028133, rs71028134, rs71028135, rs71028142, rs71028144, rs71028147, rs71028148, rs71028149, rs71028151, rs71028154, rs71028155, rs71028157, rs71028159, rs71028160, rs71028162, rs71272306, rs71272307, rs71543145, rs71543146, rs71543147, rs71543151, rs71543152, rs71543153, rs71543157, rs71543158, rs71551713, rs71568927, rs71568928, rs71568932, rs71568933, rs71568934, rs71568935, rs71568937, rs71568938, rs71568940, rs71568941, rs71568942, rs71568943, rs71568944, rs71568945, rs71568946, rs71568947, rs71568948, rs71568949, rs71568950, rs71568951, rs71568952, rs71663748, rs71669820, rs71699583, rs71714357, rs71714831, rs71785506, rs71793304, rs71808624, rs71813535, rs71935690, rs71996685, rs72081899, rs72104467, rs72197002, rs72343617, rs72468842, rs72497586, rs72554139, rs72554145, rs72618506, rs72618507, rs72618508, rs72618509, rs72973182, rs72973201, rs72973204, rs72973211, rs72973212, rs72973220, rs72973228, rs72973232, rs72973234, rs72973246, rs72973260, rs72974814, rs72977171, rs72977192, rs72978676, rs72979119, rs72979130, rs72979135, rs72979138, rs72979150, rs72979197, rs72981124, rs72981138, rs72981385, rs72981389, rs72983322, rs72983324, rs72983347, rs72983366, rs72983378, rs72983384, rs72983393, rs72983397, rs72987291, rs72988966, rs72988968, rs72988969, rs72988978, rs72988989, rs72988997, rs72989122, rs72990911, rs72990913, rs72990914, rs72990915, rs72990954, rs72990959, rs72990964, rs73585525, rs73585527, rs73585531, rs73585533, rs73585539, rs73585540, rs73585545, rs73585547, rs73585550, rs73585553, rs73585571, rs73585572, rs73585575, rs73585592, rs73585593, rs73585595, rs73587303, rs73587374, rs73587375, rs73587381, rs73587384, rs73587387, rs73587394, rs73587401, rs73588833, rs73588847, rs73588865, rs73588868, rs73588869, rs73588886, rs73588890, rs73589104, rs73589111, rs73589114, rs73589120, rs73591249, rs73591259, rs73591264, rs73591268, rs73591271, rs73591274, rs73595456, rs73596741, rs73596753, rs73596761, rs73596765, rs73596774, rs73596777, rs73596794, rs73596795, rs73596798, rs73599003, rs73599008, rs73599016, rs73599023, rs73599041, rs73599042, rs73599046, rs73599064, rs73599067, rs73599099, rs73599214, rs73599240, rs73599270, rs73601131, rs73601137, rs73601144, rs73601147, rs73773534, rs73773536, rs73773537, rs73773538, rs73773540, rs73773541, rs73773557, rs73773559, rs73773560, rs73773561, rs73773562, rs73773564, rs73773580, rs73773586, rs73773588, rs73773589, rs73773591, rs73773596, rs73773598, rs73773599, rs73773618, rs73773623, rs73773646, rs73773647, rs73773648, rs73773649, rs73773658, rs73773660, rs73773661, rs73773662, rs73773670, rs73773674, rs73773677, rs73773679, rs73773685, rs73773688, rs73773689, rs73773690, rs73773691, rs73773692, rs73773693, rs73773694, rs73773695, rs73773696, rs73773697, rs73773698, rs73773699, rs73773700, rs73773702, rs73774628, rs73774629, rs73774632, rs73774634, rs73774766, rs73774772, rs73774774, rs73774775, rs73774803, rs73774805, rs73774807, rs73774810, rs73774811, rs73774855, rs73774857, rs73774880, rs73774881, rs73774882, rs73775403, rs73775404, rs73775405, rs73775406, rs73775407, rs73775410, rs73775411, rs73775412, rs73775415, rs73775416, rs73775417, rs73775418, rs73775419, rs73775421, rs73775422, rs73775423, rs73775424, rs73775426, rs73776177, rs73776179, rs73776182, rs73776184, rs73776185, rs73776187, rs73776188, rs73776189, rs73776190, rs73776191, rs73776193, rs73776194, rs73776195, rs73776196, rs73776198, rs73776911, rs73776912, rs73776914, rs73776916, rs73776917, rs73776919, rs73776921, rs73776925, rs73776946, rs73776950, rs73776954, rs73776958, rs73776959, rs73776969, rs73776970, rs73776972, rs73777420, rs73777422, rs73777423, rs73777426, rs73777430, rs73778092, rs73778093, rs73778095, rs74297190, rs74297192, rs74317209, rs74318608, rs74342658, rs74350397, rs74352039, rs74356832, rs74381299, rs74392661, rs74401216, rs74404954, rs74413094, rs74423815, rs74446709, rs74446787, rs74448599, rs74454547, rs74485706, rs74488783, rs74492570, rs74502449, rs74515814, rs74530317, rs74532551, rs74534635, rs74535612, rs74540123, rs74541611, rs74547473, rs74557148, rs74559394, rs74573851, rs74596225, rs74598936, rs74615293, rs74621362, rs74631262, rs74632614, rs74669371, rs74669643, rs74673331, rs74682186, rs74683518, rs74683622, rs74698242, rs74699009, rs74708948, rs74716228, rs74717858, rs74734718, rs74737886, rs74747860, rs74750184, rs74753347, rs74765611, rs74767259, rs74770336, rs74772542, rs74779156, rs74783586, rs74791983, rs74792504, rs74810388, rs74827179, rs74828117, rs74830689, rs74832770, rs74833827, rs74834310, rs74837467, rs74838679, rs74843797, rs74859844, rs74867765, rs74883915, rs74894333, rs74902542, rs74917921, rs74920059, rs74930412, rs74931321, rs74935663, rs74936600, rs74949054, rs74955171, rs74957491, rs74959340, rs74961358, rs74961762, rs74973566, rs74973588, rs74975212, rs74994184, rs74995724, rs74998838, rs75010099, rs75012273, rs75012687, rs75020414, rs75054281, rs75075177, rs75084435, rs75109979, rs75126211, rs75146049, rs75149618, rs75164774, rs75166542, rs75177929, rs75211999, rs75217866, rs75238123, rs75239455, rs75249978, rs75255831, rs75261374, rs75278307, rs75284154, rs75288290, rs75298637, rs75304749, rs75314287, rs75317069, rs75339294, rs75340345, rs75357118, rs75362755, rs75386790, rs75398314, rs75402537, rs75405132, rs75414972, rs75418720, rs75444864, rs75447086, rs75453808, rs75455712, rs75464516, rs75470605, rs75473550, rs75477696, rs75480928, rs75481792, rs75481868, rs75495127, rs75497084, rs75509200, rs75512710, rs75515746, rs75538110, rs75563146, rs75571379, rs75585510, rs75590240, rs75600207, rs75606084, rs75607527, rs75611684, rs75629505, rs75636484, rs75649218, rs75658121, rs75669228, rs75677278, rs75692583, rs75706043, rs75706344, rs75718935, rs75729345, rs75742961, rs75746325, rs75785223, rs75797022, rs75803107, rs75806508, rs75819372, rs75828639, rs75832095, rs75833787, rs75842354, rs75850604, rs75858816, rs75876734, rs75889113, rs75919724, rs75921500, rs75926227, rs75931443, rs75941548, rs75950096, rs75952011, rs75953655, rs75953785, rs75958611, rs75960369, rs75961527, rs75970733, rs75981127, rs75983443, rs75983945, rs75989561, rs75990923, rs75994821, rs76003496, rs76006043, rs76020028, rs76034471, rs76039999, rs76044074, rs76047428, rs76052980, rs76054055, rs76062143, rs76062601, rs76067460, rs76069001, rs76070776, rs76071557, rs76073527, rs76096676, rs76125124, rs76128531, rs76129841, rs76135614, rs76142858, rs76148112, rs76152262, rs76154091, rs76156333, rs76158781, rs76197252, rs76200266, rs76201581, rs76202996, rs76207272, rs76213190, rs76214621, rs76224468, rs76237993, rs76241148, rs76261174, rs76263922, rs76268586, rs76277769, rs76283104, rs76291342, rs76315902, rs76322170, rs76326840, rs76349571, rs76359053, rs76363520, rs76367994, rs76389489, rs76401900, rs76407171, rs76411440, rs76434493, rs76435658, rs76468166, rs76469359, rs76482642, rs76482828, rs76485103, rs76485545, rs76489598, rs76492726, rs76493145, rs76514553, rs76516916, rs76531004, rs76535027, rs76545489, rs76547280, rs76551698, rs76556968, rs76566521, rs76568136, rs76570809, rs76579096, rs76584459, rs76596658, rs76596732, rs76606718, rs76608034, rs76613019, rs76617691, rs76633601, rs76636896, rs76637210, rs76641266, rs76647910, rs76650277, rs76653099, rs76655468, rs76659231, rs76689370, rs76689853, rs76690725, rs76695661, rs76702447, rs76710417, rs76716101, rs76723111, rs76740553, rs76748915, rs76760190, rs76772726, rs76776535, rs76778078, rs76786025, rs76792903, rs76809868, rs76818156, rs76823499, rs76826367, rs76826525, rs76826747, rs76829949, rs76838255, rs76839766, rs76861646, rs76873013, rs76876279, rs76879570, rs76883701, rs76884597, rs76885909, rs76888259, rs76891653, rs76892553, rs76897155, rs76902576, rs76905137, rs76922235, rs76941520, rs76943502, rs76973691, rs76976821, rs76977344, rs76978149, rs76984381, rs76984602, rs76994112, rs76996067, rs77010780, rs77023269, rs77026563, rs77028409, rs77044792, rs77048527, rs77054158, rs77061196, rs77074669, rs77096435, rs77100377, rs77108092, rs77109399, rs77153751, rs77172518, rs77194646, rs77212041, rs77213877, rs77216422, rs77230045, rs77233670, rs77236430, rs77272942, rs77307605, rs77308634, rs77314404, rs77316436, rs77330061, rs77348302, rs77348632, rs77357343, rs77362769, rs77364190, rs77364716, rs77365306, rs77418042, rs77423630, rs77424601, rs77428769, rs77432719, rs77435997, rs77438236, rs77445562, rs77447520, rs77457449, rs77464879, rs77479537, rs77489371, rs77495781, rs77500987, rs77501846, rs77501889, rs77502130, rs77517667, rs77526545, rs77535925, rs77545050, rs77559270, rs77578090, rs77581233, rs77596163, rs77598051, rs77601246, rs77604383, rs77605926, rs77626391, rs77638028, rs77638941, rs77660450, rs77668244, rs77701884, rs77709793, rs77723793, rs77731063, rs77746403, rs77748615, rs77756388, rs77768478, rs77770588, rs77776877, rs77791125, rs77802019, rs77804311, rs77810211, rs77811376, rs77814951, rs77815156, rs77819250, rs77819984, rs77820771, rs77844344, rs77844714, rs77844761, rs77863623, rs77864765, rs77866542, rs77870407, rs77877998, rs77880750, rs77883575, rs77887880, rs77904995, rs77907981, rs77912118, rs77920921, rs77924718, rs77946150, rs77962771, rs77967079, rs77973820, rs77988507, rs77989128, rs77990584, rs77996631, rs77996720, rs78016723, rs78022035, rs78036854, rs78053560, rs78055215, rs78055760, rs78063861, rs78072825, rs78079213, rs78099448, rs78100204, rs78108541, rs78112712, rs78118963, rs78129233, rs78131474, rs78142376, rs78150624, rs78158389, rs78163524, rs78165221, rs78179326, rs78182678, rs78186212, rs78188269, rs78192077, rs78204183, rs78206130, rs78213933, rs78222105, rs78227400, rs78236140, rs78237696, rs78257470, rs78264807, rs78289654, rs78296735, rs78299321, rs78303298, rs78304164, rs78306398, rs78314220, rs78326332, rs78333360, rs78340257, rs78346649, rs78348540, rs78349307, rs78351204, rs78352808, rs78386187, rs78402435, rs78404362, rs78404490, rs78411901, rs78418823, rs78419382, rs78427821, rs78439875, rs78449153, rs78467006, rs78472017, rs78478996, rs78489632, rs78490334, rs78500609, rs78503261, rs78506502, rs78522618, rs78524067, rs78527076, rs78531557, rs78548631, rs78559352, rs78577413, rs78595278, rs78603966, rs78607371, rs78608016, rs78611355, rs78613243, rs78619323, rs78622622, rs78627934, rs78631204, rs78632096, rs78635757, rs78640489, rs78642093, rs78642184, rs78646943, rs78649511, rs78667338, rs78678169, rs78686391, rs78687487, rs78687565, rs78693926, rs78704874, rs78705627, rs78707644, rs78709007, rs78715630, rs78736330, rs78742896, rs78749629, rs78752218, rs78768652, rs78781585, rs78784805, rs78786479, rs78789379, rs78792505, rs78797674, rs78803692, rs78805582, rs78807375, rs78808887, rs78810561, rs78811581, rs78825135, rs78839374, rs78880369, rs78883283, rs78886700, rs78891483, rs78893449, rs78901481, rs78921902, rs78942652, rs78964053, rs78965812, rs78967531, rs78991893, rs78997224, rs79008586, rs79015281, rs79017110, rs79026199, rs79033161, rs79053593, rs79069357, rs79070776, rs79079043, rs79081279, rs79087886, rs79103239, rs79114164, rs79129218, rs79130749, rs79135918, rs79139580, rs79168236, rs79188813, rs79192876, rs79204351, rs79219315, rs79236766, rs79245148, rs79249590, rs79252466, rs79257175, rs79275002, rs79275522, rs79291640, rs79292164, rs79292623, rs79299405, rs79310761, rs79320274, rs79327182, rs79332438, rs79335859, rs79349632, rs79367376, rs79392335, rs79410731, rs79424165, rs79427864, rs79455967, rs79483681, rs79499620, rs79505165, rs79532029, rs79535723, rs79545825, rs79547698, rs79555109, rs79557204, rs79570046, rs79570464, rs79572198, rs79582782, rs79590430, rs79590898, rs79592959, rs79593520, rs79596015, rs79598019, rs79599409, rs79602173, rs79607687, rs79616167, rs79632739, rs79635663, rs79638453, rs79648833, rs79652240, rs79652297, rs79691482, rs79702013, rs79705567, rs79711910, rs79727346, rs79728062, rs79732591, rs79752407, rs79759754, rs79764732, rs79792544, rs79818389, rs79830411, rs79844303, rs79853266, rs79854855, rs79861131, rs79874802, rs79875611, rs79877413, rs79883884, rs79899815, rs79920744, rs79934959, rs79936200, rs79946952, rs79952744, rs79975593, rs79979460, rs79995763, rs79996801, rs80008477, rs80020224, rs80027306, rs80047238, rs80070908, rs80073995, rs80079631, rs80083797, rs80095850, rs80095935, rs80096348, rs80104633, rs80104723, rs80112367, rs80125253, rs80126151, rs80128242, rs80134865, rs80147728, rs80163850, rs80165925, rs80170084, rs80178826, rs80182789, rs80187434, rs80190405, rs80198703, rs80214430, rs80217168, rs80256648, rs80258303, rs80259516, rs80264747, rs80278559, rs80279859, rs80282669, rs80285888, rs80287289, rs80315820, rs80324698, rs80330949, rs80342783, rs80342826, rs80353438, rs111066632, rs111233515, rs111234846, rs111243383, rs111243436, rs111243636, rs111248945, rs111257137, rs111262242, rs111263362, rs111265449, rs111268548, rs111273856, rs111277037, rs111285812, rs111287890, rs111312608, rs111321210, rs111330068, rs111333320, rs111334448, rs111337582, rs111338544, rs111340086, rs111342963, rs111346028, rs111348255, rs111360049, rs111369364, rs111373197, rs111381107, rs111401243, rs111405714, rs111412886, rs111418454, rs111422760, rs111434045, rs111439426, rs111444933, rs111446403, rs111449680, rs111450120, rs111457074, rs111458926, rs111464404, rs111482350, rs111491182, rs111491968, rs111494670, rs111495749, rs111496831, rs111500333, rs111509703, rs111513073, rs111527666, rs111531732, rs111531778, rs111541637, rs111550255, rs111553159, rs111556409, rs111559447, rs111561289, rs111562852, rs111567576, rs111568940, rs111573349, rs111580787, rs111584283, rs111585370, rs111588556, rs111592167, rs111593069, rs111605000, rs111605535, rs111607151, rs111611054, rs111612666, rs111613655, rs111627278, rs111628688, rs111628886, rs111632017, rs111639734, rs111639896, rs111642361, rs111650529, rs111664011, rs111672780, rs111677807, rs111690153, rs111690750, rs111695086, rs111695726, rs111706986, rs111711642, rs111715430, rs111723443, rs111723595, rs111743486, rs111748376, rs111755650, rs111756179, rs111757219, rs111761332, rs111764887, rs111768993, rs111773367, rs111790099, rs111790466, rs111792752, rs111793933, rs111795688, rs111795710, rs111798573, rs111803055, rs111809816, rs111813886, rs111838842, rs111841161, rs111847675, rs111848219, rs111848238, rs111853085, rs111854255, rs111862395, rs111873555, rs111876468, rs111881301, rs111882629, rs111891605, rs111895442, rs111899083, rs111900221, rs111908525, rs111911040, rs111911733, rs111923405, rs111926230, rs111947347, rs111949286, rs111951864, rs111963134, rs111964231, rs111973764, rs111975523, rs111981134, rs111988649, rs111992751, rs111994364, rs112001197, rs112006939, rs112009168, rs112018443, rs112021221, rs112047695, rs112054382, rs112054764, rs112057470, rs112058829, rs112060396, rs112083872, rs112086938, rs112096239, rs112099335, rs112104015, rs112107376, rs112114459, rs112120067, rs112140111, rs112143643, rs112151165, rs112151719, rs112153290, rs112160356, rs112169831, rs112172940, rs112189918, rs112209371, rs112211979, rs112212524, rs112216106, rs112216841, rs112220181, rs112226670, rs112251024, rs112261555, rs112261913, rs112274267, rs112291913, rs112301028, rs112304688, rs112313582, rs112318441, rs112322705, rs112326055, rs112327654, rs112329382, rs112334731, rs112344976, rs112346570, rs112351258, rs112354335, rs112356062, rs112357271, rs112362075, rs112371424, rs112372952, rs112388307, rs112388451, rs112394430, rs112408904, rs112411118, rs112413114, rs112415228, rs112432670, rs112439771, rs112440345, rs112443263, rs112455768, rs112457889, rs112468169, rs112468479, rs112469709, rs112470368, rs112471496, rs112476716, rs112487709, rs112490641, rs112496912, rs112501901, rs112505488, rs112538841, rs112543321, rs112556225, rs112556474, rs112559530, rs112569831, rs112571470, rs112572391, rs112582805, rs112594157, rs112598431, rs112604053, rs112617515, rs112637380, rs112637707, rs112643977, rs112649944, rs112658353, rs112672783, rs112674010, rs112676163, rs112677768, rs112682643, rs112684263, rs112716209, rs112716977, rs112722859, rs112724255, rs112727156, rs112735359, rs112736453, rs112742708, rs112742709, rs112745505, rs112745507, rs112747657, rs112753303, rs112759195, rs112766394, rs112773102, rs112776028, rs112776279, rs112786770, rs112787908, rs112788178, rs112798240, rs112812762, rs112820406, rs112822594, rs112829059, rs112829748, rs112835671, rs112838065, rs112843372, rs112846310, rs112858053, rs112871770, rs112873566, rs112875265, rs112878342, rs112891190, rs112892877, rs112900686, rs112903520, rs112903529, rs112908940, rs112909718, rs112925299, rs112938319, rs112945901, rs112949077, rs112951291, rs112961765, rs112977035, rs112984813, rs112992265, rs113000879, rs113009965, rs113015184, rs113019380, rs113019584, rs113022759, rs113023141, rs113024882, rs113025892, rs113031006, rs113033006, rs113034844, rs113042125, rs113042592, rs113045641, rs113048084, rs113051295, rs113053579, rs113053690, rs113053825, rs113057764, rs113062098, rs113084072, rs113090520, rs113097633, rs113099992, rs113103821, rs113108913, rs113109221, rs113114277, rs113119531, rs113123595, rs113124323, rs113128683, rs113129540, rs113153752, rs113156266, rs113160498, rs113161849, rs113168793, rs113172924, rs113173162, rs113183390, rs113194090, rs113212328, rs113221055, rs113221797, rs113224277, rs113232066, rs113239249, rs113247713, rs113250611, rs113280327, rs113285141, rs113286844, rs113287400, rs113297649, rs113298114, rs113304257, rs113304648, rs113313708, rs113316902, rs113319122, rs113331921, rs113340462, rs113346596, rs113352736, rs113355738, rs113359126, rs113372397, rs113377756, rs113387479, rs113393627, rs113394941, rs113396441, rs113396754, rs113400129, rs113400405, rs113405056, rs113409097, rs113409952, rs113417789, rs113426737, rs113429668, rs113431879, rs113452445, rs113465472, rs113475827, rs113485878, rs113486014, rs113491164, rs113496229, rs113503324, rs113510513, rs113528017, rs113533564, rs113538136, rs113541881, rs113547476, rs113556341, rs113558151, rs113569587, rs113571070, rs113579717, rs113580597, rs113586467, rs113587602, rs113590060, rs113590513, rs113598763, rs113600301, rs113604775, rs113624633, rs113631977, rs113661894, rs113663959, rs113669666, rs113670652, rs113692789, rs113695800, rs113697410, rs113702958, rs113706056, rs113714733, rs113718392, rs113721173, rs113724445, rs113726773, rs113727232, rs113728531, rs113734771, rs113746218, rs113748518, rs113772622, rs113774250, rs113782463, rs113783210, rs113783680, rs113785704, rs113790984, rs113847078, rs113850608, rs113864529, rs113865793, rs113866996, rs113868602, rs113872891, rs113873356, rs113876465, rs113876520, rs113882240, rs113888576, rs113900097, rs113901375, rs113902644, rs113903807, rs113908495, rs113909298, rs113915280, rs113926742, rs113939675, rs113941526, rs113941946, rs113956085, rs113957073, rs113971953, rs113976024, rs113980912, rs113990714, rs113991083, rs113995977, rs113998816, rs114001646, rs114008073, rs114014259, rs114015162, rs114016398, rs114017734, rs114024195, rs114037554, rs114042302, rs114044368, rs114055539, rs114055734, rs114057632, rs114064636, rs114077952, rs114078627, rs114079272, rs114081791, rs114085918, rs114088491, rs114093514, rs114123609, rs114142936, rs114146718, rs114150861, rs114150993, rs114151663, rs114170978, rs114174124, rs114175041, rs114200930, rs114208582, rs114208730, rs114215144, rs114215260, rs114219276, rs114220366, rs114225039, rs114234524, rs114238100, rs114241217, rs114243003, rs114253562, rs114257795, rs114259395, rs114261510, rs114267034, rs114280950, rs114289435, rs114300563, rs114300920, rs114311281, rs114325214, rs114325794, rs114328720, rs114331182, rs114334729, rs114336306, rs114340981, rs114345265, rs114358824, rs114371920, rs114378810, rs114384934, rs114391289, rs114392308, rs114399854, rs114400529, rs114404530, rs114414317, rs114426028, rs114430385, rs114436296, rs114438622, rs114440512, rs114443305, rs114455493, rs114457964, rs114477562, rs114478690, rs114483830, rs114484670, rs114492855, rs114501367, rs114518742, rs114519688, rs114529869, rs114534319, rs114537255, rs114567687, rs114569092, rs114569421, rs114575850, rs114576414, rs114582358, rs114591110, rs114592642, rs114605486, rs114607557, rs114607808, rs114609210, rs114610258, rs114611648, rs114612623, rs114613597, rs114617501, rs114618175, rs114647762, rs114659492, rs114663456, rs114676612, rs114687692, rs114695573, rs114706479, rs114722850, rs114725762, rs114727471, rs114743928, rs114744986, rs114748965, rs114751617, rs114763004, rs114763520, rs114766691, rs114774727, rs114793914, rs114800290, rs114805032, rs114809799, rs114814198, rs114816402, rs114822789, rs114827848, rs114862420, rs114864267, rs114869695, rs114876430, rs114878925, rs114884350, rs114906963, rs114911922, rs114924145, rs114942602, rs114951535, rs114957303, rs114979097, rs114981745, rs114984669, rs114993344, rs115000394, rs115005052, rs115007959, rs115012806, rs115018822, rs115019611, rs115020062, rs115040782, rs115041193, rs115042836, rs115048750, rs115073580, rs115074110, rs115081229, rs115082632, rs115094361, rs115094488, rs115099443, rs115106427, rs115127563, rs115143968, rs115144189, rs115144420, rs115145400, rs115146274, rs115152610, rs115153178, rs115164837, rs115183698, rs115185672, rs115211786, rs115218247, rs115220128, rs115222532, rs115228004, rs115229304, rs115235362, rs115235438, rs115237621, rs115237770, rs115239099, rs115239328, rs115251917, rs115259284, rs115261652, rs115267106, rs115270442, rs115277532, rs115279490, rs115304656, rs115310097, rs115311528, rs115316058, rs115323568, rs115332955, rs115342868, rs115398539, rs115401677, rs115413353, rs115415002, rs115422151, rs115424073, rs115427907, rs115433254, rs115435320, rs115438736, rs115440994, rs115449968, rs115461893, rs115481581, rs115482079, rs115482272, rs115488209, rs115488979, rs115501217, rs115504663, rs115506597, rs115508083, rs115510132, rs115515780, rs115516995, rs115528052, rs115529809, rs115540870, rs115541232, rs115550427, rs115551237, rs115555297, rs115557749, rs115568340, rs115582117, rs115584041, rs115593469, rs115597846, rs115600447, rs115630988, rs115633639, rs115644639, rs115655704, rs115657131, rs115660561, rs115662437, rs115663955, rs115665649, rs115685877, rs115689459, rs115708151, rs115709105, rs115720190, rs115720776, rs115721764, rs115722205, rs115725714, rs115731594, rs115742542, rs115750756, rs115757012, rs115757739, rs115777427, rs115778447, rs115781698, rs115801167, rs115807670, rs115826082, rs115829000, rs115829837, rs115836813, rs115843762, rs115844238, rs115847097, rs115849797, rs115874913, rs115875874, rs115877874, rs115879084, rs115881055, rs115883816, rs115884661, rs115890486, rs115891538, rs115892449, rs115907207, rs115909437, rs115911854, rs115913577, rs115916776, rs115944556, rs115949772, rs115968605, rs115981243, rs115981736, rs115983817, rs115985113, rs115997897, rs116005059, rs116007194, rs116007482, rs116010453, rs116023652, rs116026138, rs116036096, rs116038405, rs116054787, rs116060135, rs116061421, rs116062013, rs116062466, rs116090689, rs116100849, rs116115294, rs116117802, rs116128872, rs116143304, rs116148046, rs116154086, rs116154909, rs116155067, rs116164094, rs116166097, rs116167840, rs116176293, rs116179760, rs116181625, rs116191553, rs116205251, rs116208973, rs116217549, rs116222732, rs116223750, rs116223939, rs116223971, rs116234571, rs116244437, rs116248437, rs116249349, rs116299122, rs116300553, rs116304138, rs116308952, rs116317528, rs116320738, rs116326012, rs116332737, rs116333875, rs116337139, rs116351928, rs116365881, rs116369276, rs116369658, rs116370573, rs116371001, rs116379702, rs116381571, rs116381602, rs116383506, rs116394168, rs116395578, rs116413614, rs116419198, rs116436764, rs116438503, rs116455799, rs116456766, rs116465194, rs116465267, rs116477045, rs116477346, rs116478270, rs116478804, rs116478808, rs116479180, rs116482250, rs116489515, rs116489643, rs116507592, rs116509118, rs116511861, rs116520268, rs116522700, rs116532131, rs116537240, rs116538716, rs116547516, rs116559862, rs116560409, rs116561219, rs116565389, rs116568602, rs116577332, rs116579209, rs116581101, rs116585961, rs116589231, rs116592069, rs116602227, rs116605746, rs116609086, rs116610521, rs116612500, rs116613994, rs116614160, rs116632691, rs116634083, rs116635003, rs116641537, rs116663322, rs116665902, rs116678855, rs116686719, rs116697772, rs116702822, rs116704964, rs116712462, rs116712741, rs116716704, rs116723595, rs116727211, rs116738052, rs116746687, rs116760575, rs116765705, rs116767147, rs116773503, rs116774185, rs116780992, rs116787592, rs116789890, rs116790221, rs116794242, rs116797445, rs116798238, rs116807501, rs116814861, rs116823660, rs116832694, rs116835118, rs116838228, rs116864218, rs116875404, rs116895729, rs116896018, rs116914504, rs116920091, rs116930307, rs116937110, rs116938081, rs116938857, rs116945107, rs116963822, rs116974519, rs116980583, rs116982715, rs116992485, rs116996216, rs116998226, rs117013373, rs117016563, rs117016968, rs117025267, rs117031361, rs117033326, rs117039928, rs117055467, rs117073313, rs117077066, rs117095634, rs117096733, rs117098691, rs117099280, rs117116822, rs117119173, rs117134672, rs117157356, rs117162257, rs117174537, rs117180728, rs117189060, rs117197955, rs117204407, rs117207904, rs117212378, rs117214194, rs117229836, rs117233949, rs117248627, rs117250308, rs117252080, rs117254067, rs117259556, rs117262647, rs117265411, rs117265661, rs117268326, rs117269941, rs117275446, rs117305602, rs117310755, rs117311536, rs117312678, rs117316128, rs117321165, rs117328866, rs117357196, rs117357864, rs117364795, rs117365423, rs117413097, rs117422805, rs117446139, rs117454267, rs117463818, rs117466593, rs117472372, rs117477958, rs117495833, rs117501367, rs117512871, rs117519966, rs117520212, rs117531524, rs117532699, rs117553717, rs117581822, rs117598117, rs117604530, rs117610792, rs117615604, rs117624451, rs117629772, rs117634573, rs117656058, rs117665543, rs117700734, rs117711732, rs117720810, rs117729633, rs117742595, rs117763318, rs117765281, rs117774226, rs117781224, rs117788652, rs117792350, rs117805427, rs117817771, rs117818596, rs117819104, rs117820664, rs117825195, rs117844791, rs117865174, rs117866376, rs117884199, rs117906789, rs117912502, rs117913933, rs117929166, rs117938315, rs117979853, rs117988669, rs117998993, rs118004609, rs118012475, rs118015056, rs118022578, rs118026014, rs118029548, rs118030268, rs118037989, rs118049333, rs118053441, rs118056725, rs118059050, rs118063594, rs118068611, rs118081893, rs118083923, rs118104220, rs118108588, rs118109049, rs118116924, rs118122880, rs118125190, rs118132304, rs118142125, rs118147866, rs118149224, rs118172544, rs121913569, rs121913570, rs121913572, rs121913573, rs121913574, rs121913575, rs121913576, rs121913577, rs137856112, rs137865288, rs137869265, rs137871661, rs137872235, rs137874184, rs137876245, rs137878770, rs137882765, rs137889532, rs137894251, rs137898940, rs137906122, rs137931481, rs137961796, rs137962409, rs137970641, rs137980792, rs138018456, rs138021061, rs138021554, rs138025571, rs138026038, rs138027756, rs138028250, rs138033631, rs138036939, rs138038320, rs138039628, rs138042085, rs138055319, rs138060291, rs138062595, rs138072320, rs138081645, rs138082854, rs138084654, rs138089106, rs138094548, rs138100285, rs138100597, rs138102973, rs138119646, rs138137214, rs138140951, rs138159611, rs138161473, rs138162760, rs138167177, rs138173386, rs138186904, rs138193381, rs138193582, rs138195772, rs138195835, rs138200130, rs138201943, rs138207270, rs138213540, rs138223602, rs138235088, rs138239135, rs138247403, rs138257689, rs138258563, rs138260000, rs138260950, rs138265150, rs138285733, rs138296015, rs138297892, rs138300513, rs138303386, rs138306418, rs138324772, rs138329506, rs138330919, rs138336262, rs138345391, rs138348758, rs138352398, rs138357991, rs138364573, rs138365742, rs138368129, rs138374711, rs138381217, rs138386920, rs138396530, rs138402129, rs138405120, rs138418149, rs138431095, rs138435567, rs138435668, rs138441042, rs138447826, rs138455075, rs138457675, rs138459703, rs138463291, rs138469984, rs138486086, rs138488506, rs138489418, rs138491187, rs138495131, rs138495866, rs138498630, rs138515972, rs138525576, rs138526608, rs138533192, rs138541922, rs138552282, rs138556498, rs138569045, rs138573689, rs138573751, rs138576094, rs138579487, rs138579949, rs138585792, rs138591386, rs138599506, rs138600346, rs138614185, rs138624133, rs138625091, rs138627604, rs138640170, rs138656044, rs138678945, rs138680947, rs138690727, rs138695453, rs138696709, rs138700232, rs138702650, rs138708478, rs138718275, rs138724448, rs138728178, rs138729785, rs138732723, rs138735094, rs138737135, rs138741528, rs138744745, rs138747734, rs138758523, rs138760381, rs138763345, rs138765295, rs138768368, rs138771054, rs138779758, rs138782094, rs138782096, rs138786838, rs138791948, rs138794030, rs138801190, rs138809679, rs138812618, rs138815973, rs138827323, rs138833498, rs138848114, rs138851354, rs138853489, rs138854484, rs138855277, rs138860962, rs138873433, rs138890684, rs138899671, rs138904560, rs138906351, rs138913295, rs138919068, rs138932220, rs138938071, rs138944067, rs138945312, rs138948857, rs138950309, rs138955544, rs138957755, rs138964034, rs138964661, rs138980822, rs138981492, rs138983455, rs138989915, rs138994246, rs139002636, rs139017179, rs139020715, rs139022822, rs139025641, rs139063403, rs139066846, rs139068567, rs139069231, rs139070796, rs139072394, rs139079325, rs139082692, rs139087693, rs139093294, rs139093764, rs139093923, rs139095760, rs139104974, rs139108616, rs139120330, rs139124845, rs139158172, rs139159116, rs139166618, rs139177153, rs139184458, rs139186020, rs139186814, rs139188303, rs139188876, rs139191084, rs139197219, rs139206880, rs139211026, rs139213675, rs139216525, rs139217643, rs139221370, rs139222049, rs139223868, rs139224310, rs139228402, rs139229100, rs139230032, rs139235402, rs139238943, rs139244736, rs139246515, rs139247575, rs139255535, rs139262244, rs139279499, rs139280910, rs139289269, rs139301555, rs139303397, rs139323277, rs139330844, rs139341523, rs139347772, rs139348553, rs139351727, rs139354412, rs139360741, rs139366013, rs139373649, rs139378285, rs139380888, rs139383477, rs139385497, rs139387052, rs139388763, rs139394131, rs139404194, rs139429635, rs139431775, rs139437682, rs139441912, rs139445956, rs139452632, rs139459136, rs139467053, rs139473887, rs139476223, rs139483832, rs139484440, rs139485727, rs139491292, rs139493391, rs139494248, rs139495086, rs139500684, rs139505469, rs139507396, rs139508903, rs139516848, rs139517689, rs139523285, rs139526588, rs139541279, rs139552824, rs139557893, rs139575800, rs139579939, rs139583798, rs139586720, rs139599479, rs139612361, rs139613211, rs139615118, rs139616165, rs139621146, rs139624883, rs139625764, rs139630300, rs139633655, rs139639966, rs139640002, rs139640896, rs139642622, rs139644749, rs139662440, rs139664940, rs139665175, rs139671577, rs139672018, rs139675425, rs139678874, rs139682635, rs139684979, rs139686316, rs139694555, rs139705159, rs139715289, rs139721949, rs139728343, rs139732188, rs139733835, rs139738531, rs139739075, rs139750229, rs139761526, rs139761637, rs139762360, rs139787675, rs139787827, rs139794220, rs139797449, rs139804742, rs139812770, rs139814921, rs139817465, rs139824017, rs139834860, rs139839707, rs139843107, rs139843473, rs139846716, rs139856865, rs139859174, rs139861500, rs139863472, rs139863716, rs139867757, rs139869063, rs139872209, rs139883940, rs139884698, rs139885599, rs139886598, rs139889492, rs139889878, rs139897990, rs139899365, rs139909707, rs139911594, rs139912563, rs139912937, rs139915374, rs139917805, rs139918375, rs139924640, rs139926292, rs139927300, rs139932249, rs139936381, rs139939537, rs139950489, rs139955435, rs139959838, rs139962424, rs139969448, rs139980879, rs139981540, rs139994776, rs139998143, rs139999729, rs140006118, rs140044480, rs140048943, rs140049899, rs140055204, rs140058077, rs140066923, rs140069743, rs140072239, rs140073243, rs140073793, rs140083846, rs140091476, rs140092288, rs140099790, rs140102646, rs140118033, rs140121903, rs140124103, rs140124739, rs140150651, rs140153173, rs140167282, rs140179905, rs140181475, rs140189471, rs140199131, rs140216414, rs140216712, rs140218566, rs140218781, rs140230175, rs140237505, rs140241446, rs140241934, rs140242998, rs140258102, rs140260538, rs140264594, rs140268351, rs140274465, rs140283614, rs140290219, rs140290921, rs140297406, rs140298710, rs140306180, rs140307546, rs140308956, rs140314048, rs140315174, rs140330109, rs140333324, rs140340816, rs140343568, rs140348723, rs140352216, rs140356960, rs140358142, rs140363941, rs140373926, rs140388578, rs140388905, rs140392094, rs140406179, rs140444745, rs140449943, rs140452212, rs140456002, rs140463348, rs140467482, rs140475773, rs140475809, rs140478085, rs140479358, rs140481758, rs140483001, rs140506019, rs140509354, rs140511423, rs140515009, rs140516274, rs140517272, rs140522415, rs140526161, rs140532676, rs140546345, rs140554479, rs140574226, rs140581571, rs140581662, rs140583339, rs140586052, rs140586844, rs140587198, rs140598375, rs140598523, rs140604077, rs140622593, rs140628847, rs140630542, rs140632849, rs140636079, rs140643403, rs140643575, rs140646349, rs140653602, rs140654844, rs140658201, rs140660386, rs140660902, rs140680416, rs140687513, rs140689599, rs140690471, rs140698743, rs140699261, rs140700293, rs140705175, rs140705882, rs140707547, rs140709565, rs140710079, rs140713078, rs140715995, rs140728159, rs140731054, rs140731631, rs140748383, rs140758701, rs140775269, rs140787764, rs140790857, rs140803092, rs140806976, rs140810902, rs140815413, rs140816043, rs140818022, rs140822762, rs140824864, rs140826007, rs140828163, rs140832391, rs140834371, rs140841364, rs140842795, rs140843350, rs140845521, rs140850450, rs140854334, rs140856025, rs140860458, rs140866273, rs140875525, rs140878345, rs140895872, rs140919632, rs140924791, rs140927743, rs140929335, rs140932992, rs140933139, rs140944404, rs140951471, rs140958208, rs140961196, rs140965494, rs140970137, rs140975151, rs140979186, rs140980501, rs140985319, rs140989143, rs140990394, rs140996733, rs140999714, rs141000104, rs141000358, rs141005239, rs141008378, rs141014278, rs141020416, rs141030265, rs141039854, rs141049912, rs141056953, rs141058341, rs141058899, rs141064925, rs141073487, rs141094936, rs141097248, rs141098502, rs141101234, rs141106126, rs141110324, rs141110740, rs141113443, rs141114036, rs141114204, rs141115329, rs141117505, rs141120868, rs141147137, rs141149087, rs141150540, rs141154325, rs141156860, rs141163967, rs141174721, rs141179845, rs141179901, rs141180147, rs141189508, rs141190803, rs141190920, rs141199388, rs141207317, rs141211788, rs141213446, rs141214507, rs141217258, rs141223695, rs141228174, rs141235562, rs141240736, rs141245846, rs141257091, rs141261081, rs141268982, rs141270186, rs141270313, rs141277751, rs141292787, rs141296743, rs141303825, rs141305697, rs141314895, rs141322340, rs141325509, rs141333038, rs141335849, rs141340479, rs141343735, rs141344044, rs141353904, rs141363186, rs141363820, rs141393268, rs141393851, rs141395430, rs141404382, rs141404777, rs141409920, rs141413097, rs141422669, rs141440535, rs141461452, rs141462095, rs141471984, rs141476898, rs141488376, rs141493576, rs141498556, rs141501736, rs141518143, rs141521127, rs141522755, rs141523464, rs141526373, rs141529404, rs141530552, rs141531721, rs141537701, rs141550396, rs141556726, rs141558787, rs141565457, rs141567267, rs141572083, rs141590386, rs141598155, rs141627516, rs141631137, rs141641893, rs141646727, rs141655130, rs141658354, rs141660649, rs141664297, rs141671492, rs141673292, rs141675044, rs141683611, rs141683882, rs141688084, rs141689795, rs141703616, rs141714068, rs141747176, rs141752246, rs141759238, rs141770842, rs141773436, rs141774832, rs141776436, rs141778982, rs141791354, rs141791852, rs141792101, rs141800867, rs141804957, rs141805647, rs141808087, rs141813283, rs141813913, rs141817017, rs141818402, rs141818479, rs141820226, rs141822789, rs141825503, rs141829382, rs141835505, rs141835910, rs141841398, rs141850405, rs141857004, rs141861218, rs141873905, rs141875478, rs141878714, rs141880909, rs141882980, rs141900050, rs141902012, rs141904675, rs141911213, rs141914306, rs141920360, rs141921529, rs141941028, rs141943939, rs141948085, rs141948182, rs141950173, rs141950826, rs141953769, rs141960281, rs141966413, rs141966902, rs141982680, rs141990645, rs141994691, rs141999849, rs142008017, rs142035904, rs142039834, rs142042435, rs142044653, rs142045571, rs142046132, rs142048411, rs142061692, rs142083777, rs142099702, rs142101467, rs142116741, rs142125733, rs142126511, rs142127449, rs142131561, rs142135902, rs142142994, rs142145943, rs142146319, rs142160251, rs142164767, rs142172649, rs142176104, rs142176702, rs142178396, rs142187424, rs142187683, rs142188007, rs142194507, rs142200123, rs142211377, rs142217106, rs142224259, rs142227110, rs142232120, rs142232407, rs142234663, rs142251946, rs142261616, rs142263000, rs142264176, rs142276947, rs142277755, rs142278472, rs142283378, rs142290886, rs142290982, rs142291067, rs142291771, rs142292534, rs142293447, rs142294175, rs142298987, rs142306977, rs142308738, rs142308781, rs142311146, rs142323769, rs142326342, rs142332671, rs142333117, rs142345851, rs142349928, rs142359373, rs142362903, rs142375456, rs142382609, rs142388169, rs142411001, rs142413192, rs142413413, rs142413789, rs142414551, rs142419442, rs142430690, rs142431635, rs142437429, rs142446519, rs142450468, rs142458851, rs142464965, rs142473515, rs142474270, rs142477933, rs142480948, rs142482323, rs142486468, rs142487226, rs142490269, rs142497454, rs142502922, rs142506563, rs142518127, rs142528170, rs142531344, rs142536231, rs142543135, rs142545032, rs142560062, rs142566980, rs142570106, rs142570297, rs142571961, rs142580141, rs142589494, rs142591459, rs142592395, rs142610738, rs142613908, rs142616673, rs142617904, rs142624055, rs142629649, rs142635777, rs142635925, rs142637286, rs142652475, rs142653020, rs142655127, rs142657708, rs142660143, rs142671080, rs142671449, rs142671942, rs142682717, rs142682953, rs142697368, rs142699072, rs142711091, rs142719923, rs142733001, rs142738398, rs142745227, rs142749906, rs142756443, rs142766226, rs142770241, rs142770478, rs142777675, rs142781107, rs142788744, rs142793611, rs142794188, rs142802654, rs142802868, rs142808545, rs142809455, rs142812017, rs142823110, rs142827673, rs142827711, rs142830188, rs142844813, rs142849133, rs142854272, rs142863784, rs142868189, rs142872499, rs142875620, rs142882597, rs142898312, rs142909871, rs142915139, rs142930348, rs142935000, rs142952863, rs142958879, rs142965498, rs142966291, rs142968448, rs142971323, rs142972246, rs142978074, rs142989915, rs142999537, rs143002561, rs143005275, rs143014505, rs143014587, rs143015413, rs143023501, rs143024246, rs143028796, rs143030533, rs143037866, rs143039069, rs143041659, rs143043212, rs143044130, rs143044542, rs143047379, rs143053451, rs143060797, rs143071357, rs143071880, rs143078882, rs143080314, rs143087027, rs143088426, rs143088648, rs143094094, rs143101957, rs143107213, rs143113517, rs143138805, rs143147948, rs143148079, rs143163926, rs143164158, rs143167671, rs143180104, rs143185888, rs143197336, rs143198308, rs143201212, rs143204173, rs143205326, rs143205522, rs143205723, rs143206604, rs143208989, rs143210103, rs143215851, rs143216277, rs143218351, rs143236341, rs143236363, rs143244230, rs143247439, rs143247928, rs143261175, rs143287281, rs143313635, rs143316875, rs143321315, rs143327371, rs143333246, rs143333963, rs143337134, rs143340680, rs143343647, rs143350595, rs143351333, rs143354620, rs143355613, rs143360700, rs143367619, rs143369942, rs143376366, rs143378246, rs143379448, rs143380460, rs143381464, rs143382009, rs143403539, rs143438428, rs143449700, rs143458524, rs143460139, rs143460189, rs143462958, rs143470155, rs143475437, rs143484264, rs143485352, rs143485677, rs143490300, rs143493382, rs143497993, rs143498044, rs143499676, rs143503987, rs143505868, rs143511452, rs143513335, rs143519244, rs143547348, rs143551704, rs143556135, rs143564398, rs143566597, rs143573521, rs143585181, rs143600126, rs143607513, rs143618442, rs143620488, rs143623690, rs143625500, rs143626559, rs143628307, rs143637663, rs143652453, rs143654695, rs143663886, rs143664472, rs143672161, rs143672821, rs143674727, rs143678906, rs143680577, rs143683438, rs143684268, rs143700493, rs143703353, rs143709015, rs143732266, rs143742125, rs143752957, rs143755387, rs143758433, rs143760928, rs143764412, rs143765681, rs143783163, rs143788511, rs143790170, rs143795286, rs143800904, rs143803815, rs143805359, rs143806266, rs143807303, rs143808056, rs143822939, rs143842422, rs143843619, rs143850650, rs143856248, rs143857774, rs143859787, rs143869330, rs143873096, rs143904854, rs143906156, rs143908568, rs143910659, rs143912250, rs143930006, rs143932015, rs143939039, rs143952524, rs143958579, rs143977296, rs143978199, rs143984438, rs143984770, rs143986011, rs143987295, rs143987313, rs143989187, rs143997370, rs143998143, rs144004152, rs144004456, rs144015143, rs144016038, rs144024116, rs144030866, rs144032537, rs144034601, rs144053359, rs144053918, rs144065073, rs144065266, rs144066164, rs144069619, rs144069907, rs144081571, rs144081749, rs144087399, rs144101336, rs144102353, rs144113980, rs144121011, rs144132451, rs144145865, rs144154799, rs144155507, rs144160821, rs144197922, rs144199118, rs144202694, rs144211997, rs144212133, rs144215788, rs144227624, rs144245476, rs144256778, rs144260302, rs144271034, rs144271363, rs144272532, rs144275927, rs144276500, rs144277394, rs144279318, rs144280349, rs144281182, rs144281863, rs144290078, rs144290730, rs144293184, rs144301099, rs144310211, rs144311518, rs144318893, rs144341048, rs144347282, rs144348368, rs144355117, rs144375040, rs144379457, rs144383629, rs144394186, rs144396546, rs144401132, rs144402379, rs144406027, rs144413852, rs144418131, rs144421944, rs144432790, rs144439814, rs144447411, rs144448521, rs144450370, rs144459653, rs144459695, rs144460307, rs144467591, rs144469189, rs144478853, rs144478962, rs144489099, rs144492513, rs144493923, rs144495982, rs144497953, rs144499790, rs144511785, rs144534372, rs144537269, rs144546987, rs144549288, rs144556052, rs144558104, rs144567228, rs144569215, rs144580350, rs144583413, rs144593642, rs144599848, rs144606143, rs144607362, rs144616009, rs144624234, rs144626076, rs144630465, rs144653395, rs144664427, rs144669302, rs144687880, rs144692090, rs144695364, rs144695567, rs144695720, rs144695733, rs144695833, rs144698658, rs144717264, rs144722243, rs144725812, rs144727947, rs144733335, rs144743640, rs144744339, rs144753209, rs144757908, rs144761571, rs144765432, rs144771361, rs144784939, rs144815329, rs144830879, rs144838550, rs144839646, rs144845618, rs144846932, rs144849198, rs144852436, rs144855195, rs144855722, rs144863905, rs144871818, rs144885272, rs144888885, rs144895171, rs144901086, rs144902340, rs144903993, rs144912147, rs144912409, rs144920290, rs144922938, rs144924560, rs144926286, rs144934671, rs144939510, rs144939642, rs144943596, rs144943820, rs144946631, rs144948613, rs144951479, rs144962802, rs144965115, rs144970030, rs144981981, rs144984394, rs144990533, rs144999189, rs145003999, rs145010072, rs145012568, rs145023738, rs145029678, rs145030859, rs145044739, rs145046296, rs145046397, rs145075764, rs145076411, rs145080119, rs145080209, rs145085922, rs145092205, rs145095037, rs145097190, rs145099763, rs145100644, rs145102412, rs145103282, rs145104280, rs145127299, rs145127402, rs145128913, rs145129199, rs145133600, rs145146849, rs145149634, rs145155803, rs145163319, rs145167001, rs145170154, rs145173934, rs145174077, rs145178003, rs145183953, rs145185458, rs145201256, rs145203489, rs145207063, rs145212782, rs145224647, rs145256640, rs145259006, rs145261144, rs145264955, rs145266079, rs145266584, rs145270426, rs145279390, rs145285276, rs145289275, rs145290464, rs145296136, rs145300438, rs145310035, rs145319316, rs145321979, rs145322853, rs145328385, rs145331700, rs145331877, rs145332196, rs145355049, rs145355176, rs145359765, rs145367081, rs145368477, rs145370789, rs145370943, rs145382825, rs145393285, rs145393297, rs145395627, rs145396944, rs145413876, rs145418736, rs145420388, rs145433200, rs145446852, rs145458008, rs145461377, rs145465528, rs145478491, rs145483370, rs145491858, rs145509621, rs145510678, rs145511748, rs145517754, rs145524532, rs145529219, rs145529840, rs145533142, rs145551804, rs145564159, rs145579258, rs145580801, rs145592885, rs145598380, rs145604903, rs145611592, rs145612383, rs145615061, rs145618142, rs145622088, rs145625338, rs145637223, rs145644380, rs145647846, rs145647936, rs145654250, rs145655167, rs145656930, rs145661565, rs145671117, rs145671919, rs145676524, rs145679652, rs145681228, rs145682802, rs145694652, rs145707485, rs145710374, rs145710592, rs145718071, rs145735846, rs145744036, rs145752259, rs145774002, rs145774843, rs145788474, rs145792392, rs145793253, rs145802868, rs145806046, rs145812871, rs145815170, rs145815606, rs145819277, rs145824459, rs145830511, rs145833142, rs145844234, rs145850115, rs145864121, rs145867225, rs145869584, rs145873526, rs145885540, rs145891953, rs145892658, rs145901020, rs145908886, rs145909346, rs145910124, rs145910867, rs145912098, rs145913194, rs145926940, rs145929096, rs145933703, rs145940188, rs145944210, rs145952118, rs145955287, rs145958389, rs145981168, rs145986771, rs145994240, rs145995940, rs146006612, rs146007487, rs146008855, rs146012956, rs146013068, rs146028344, rs146034673, rs146040866, rs146053754, rs146065946, rs146078755, rs146079316, rs146091900, rs146093753, rs146094787, rs146097890, rs146113061, rs146117640, rs146120018, rs146120862, rs146131371, rs146131857, rs146133312, rs146137141, rs146151445, rs146151965, rs146157708, rs146162977, rs146165674, rs146168156, rs146171754, rs146187409, rs146190135, rs146194956, rs146199936, rs146205270, rs146215152, rs146216782, rs146221789, rs146233443, rs146233561, rs146235379, rs146241133, rs146242687, rs146251772, rs146252291, rs146252362, rs146254184, rs146257923, rs146258108, rs146270739, rs146281819, rs146302633, rs146304630, rs146306110, rs146309795, rs146317231, rs146322873, rs146335727, rs146343392, rs146344180, rs146350203, rs146364172, rs146373777, rs146374776, rs146378080, rs146378546, rs146391424, rs146415508, rs146418269, rs146430771, rs146435465, rs146438168, rs146443588, rs146454454, rs146455951, rs146458092, rs146459429, rs146460146, rs146462599, rs146467951, rs146472526, rs146473777, rs146478118, rs146488734, rs146490004, rs146490454, rs146514401, rs146516214, rs146522136, rs146524592, rs146525120, rs146526665, rs146529533, rs146532197, rs146540506, rs146559522, rs146559712, rs146561848, rs146567983, rs146578222, rs146579095, rs146598172, rs146601002, rs146604592, rs146609182, rs146611180, rs146612173, rs146616937, rs146624076, rs146634137, rs146649325, rs146649398, rs146658371, rs146661276, rs146661632, rs146671135, rs146674960, rs146675441, rs146676771, rs146678093, rs146687611, rs146688731, rs146689275, rs146696860, rs146697954, rs146700656, rs146700972, rs146703976, rs146712611, rs146716098, rs146718115, rs146727223, rs146727251, rs146736560, rs146742904, rs146754312, rs146768796, rs146780523, rs146780535, rs146790997, rs146797529, rs146798932, rs146799370, rs146799923, rs146800522, rs146805786, rs146817692, rs146818480, rs146819916, rs146823182, rs146827694, rs146832716, rs146836522, rs146846525, rs146851988, rs146854942, rs146875541, rs146887049, rs146887477, rs146892796, rs146898693, rs146900635, rs146911230, rs146914857, rs146916102, rs146917610, rs146925271, rs146927165, rs146948451, rs146959203, rs146962401, rs146970566, rs146971582, rs146975432, rs146993447, rs147000649, rs147001697, rs147003684, rs147016855, rs147020068, rs147020807, rs147023003, rs147057821, rs147064354, rs147066414, rs147067685, rs147067931, rs147076333, rs147077184, rs147077722, rs147078443, rs147080767, rs147093775, rs147096892, rs147103590, rs147109428, rs147110326, rs147124515, rs147125771, rs147125884, rs147126242, rs147128963, rs147135003, rs147140175, rs147146794, rs147148010, rs147149874, rs147166479, rs147174330, rs147185142, rs147187938, rs147197361, rs147198798, rs147207077, rs147212193, rs147216290, rs147220402, rs147220630, rs147221975, rs147236017, rs147239087, rs147242491, rs147242748, rs147249027, rs147252424, rs147253199, rs147253475, rs147256520, rs147266262, rs147267001, rs147270644, rs147280290, rs147282596, rs147291222, rs147292733, rs147299243, rs147301872, rs147303777, rs147313895, rs147328642, rs147344820, rs147346665, rs147349352, rs147359721, rs147361284, rs147363952, rs147377505, rs147387610, rs147393608, rs147398243, rs147405443, rs147407422, rs147408923, rs147409515, rs147410987, rs147418220, rs147420847, rs147429717, rs147430700, rs147431685, rs147436549, rs147441381, rs147448682, rs147455282, rs147456074, rs147458345, rs147464769, rs147464809, rs147464852, rs147481053, rs147482026, rs147498584, rs147498790, rs147506646, rs147510409, rs147515621, rs147525627, rs147529124, rs147538595, rs147545174, rs147555231, rs147555421, rs147563245, rs147572139, rs147581913, rs147586897, rs147588392, rs147593313, rs147596133, rs147600388, rs147613516, rs147621319, rs147623363, rs147626294, rs147627971, rs147632774, rs147634568, rs147642401, rs147642797, rs147644539, rs147655116, rs147655191, rs147658593, rs147668088, rs147671190, rs147687374, rs147690302, rs147690731, rs147692933, rs147705836, rs147715567, rs147715634, rs147718280, rs147726972, rs147737041, rs147738052, rs147742443, rs147744763, rs147745385, rs147749786, rs147759598, rs147763394, rs147773733, rs147777593, rs147787288, rs147797010, rs147817738, rs147822520, rs147836336, rs147837694, rs147839001, rs147841151, rs147841190, rs147847417, rs147850482, rs147850997, rs147857398, rs147858586, rs147869833, rs147878439, rs147879728, rs147880506, rs147886278, rs147893195, rs147901774, rs147902296, rs147912018, rs147916447, rs147924467, rs147924597, rs147925483, rs147945759, rs147947917, rs147948062, rs147949119, rs147954629, rs147957901, rs147958673, rs147958976, rs147964120, rs147984628, rs147987573, rs147989105, rs147992878, rs147996982, rs147998542, rs147999894, rs148005864, rs148010023, rs148014480, rs148016532, rs148020848, rs148030566, rs148044115, rs148047753, rs148051442, rs148059893, rs148060790, rs148063482, rs148067960, rs148068659, rs148070025, rs148078699, rs148079630, rs148080651, rs148082042, rs148083014, rs148089727, rs148103319, rs148110726, rs148114130, rs148114197, rs148120481, rs148131019, rs148132911, rs148134007, rs148134822, rs148139863, rs148144849, rs148151002, rs148155534, rs148157089, rs148162688, rs148166042, rs148169725, rs148196021, rs148202453, rs148205328, rs148213603, rs148218614, rs148223499, rs148230673, rs148258431, rs148262047, rs148266570, rs148274825, rs148277554, rs148280723, rs148285138, rs148285650, rs148286394, rs148290803, rs148293106, rs148297552, rs148299820, rs148303153, rs148313644, rs148325821, rs148343999, rs148345503, rs148347717, rs148350931, rs148356517, rs148360999, rs148363259, rs148369144, rs148379975, rs148391360, rs148398501, rs148403110, rs148409087, rs148419866, rs148427626, rs148433965, rs148438417, rs148440333, rs148447904, rs148655840, rs148661169, rs148665727, rs148670282, rs148676605, rs148678987, rs148680702, rs148682242, rs148723726, rs148729095, rs148729713, rs148730778, rs148730969, rs148732116, rs148733382, rs148737657, rs148749681, rs148750469, rs148761515, rs148790332, rs148799860, rs148801594, rs148805162, rs148805966, rs148807546, rs148825053, rs148826898, rs148834462, rs148835930, rs148841560, rs148842410, rs148848120, rs148647000, rs148643199, rs148616139, rs148607737, rs148602287, rs148597204, rs148597169, rs148596670, rs148594945, rs148591874, rs148589734, rs148582368, rs148573809, rs148544189, rs148543593, rs148534864, rs148532059, rs148528579, rs148523345, rs148521224, rs148520570, rs148514029, rs148508615, rs148504699, rs148493751, rs148476491, rs148474187, rs148469329, rs148466809, rs148461168, rs148459238, rs148457930, rs148451985, rs148451013, rs148450117, rs148856700, rs148858064, rs148885904, rs148892369, rs148893328, rs148905630, rs148912474, rs148912718, rs148914625, rs148917441, rs148922214, rs148923515, rs148927496, rs148932069, rs148932906, rs148933896, rs148968792, rs148978167, rs148980305, rs148981629, rs148981745, rs148991258, rs148994827, rs148996923, rs149000261, rs149004027, rs149030895, rs149031812, rs149041510, rs149043152, rs149048154, rs149049758, rs149052762, rs149055335, rs149055720, rs149058804, rs149064338, rs149067385, rs149069059, rs149101795, rs149107547, rs149116043, rs149118283, rs149120794, rs149124008, rs149127310, rs149131043, rs149140828, rs149165006, rs149166869, rs149176926, rs149179622, rs149185765, rs149187705, rs149189376, rs149189914, rs149193385, rs149195203, rs149198349, rs149200998, rs149202907, rs149216647, rs149217082, rs149376300, rs149378130, rs149381363, rs149394629, rs149409017, rs149427518, rs149434841, rs149447536, rs149448324, rs149455601, rs149458802, rs149469415, rs149517021, rs149522749, rs149528651, rs149532766, rs149535498, rs149540854, rs149546680, rs149561195, rs149564843, rs149568140, rs149574339, rs149576382, rs149583553, rs149584988, rs149586172, rs149587366, rs149590883, rs149597000, rs149624195, rs149631969, rs149633778, rs149634485, rs149649531, rs149651160, rs149654569, rs149665000, rs149670497, rs149675943, rs149683596, rs149684258, rs149688919, rs149690205, rs149515091, rs149512197, rs149511347, rs149507377, rs149503851, rs149501809, rs149494943, rs149487202, rs149298939, rs149294632, rs149290625, rs149287138, rs149279924, rs149255599, rs149254699, rs149247694, rs149246382, rs149239097, rs149236729, rs149221317, rs149373272, rs149370258, rs149365313, rs149359721, rs149352100, rs149347601, rs149318475, rs149315162, rs149310385, rs149305108, rs149300672, rs149690300, rs149698749, rs149699965, rs149701729, rs149703483, rs149707542, rs149712239, rs149740548, rs149742226, rs149744355, rs149746658, rs149750980, rs149753273, rs149757278, rs149764064, rs149766374, rs149770731, rs149783033, rs149806209, rs149810592, rs149811988, rs149813026, rs149814812, rs149818783, rs149822613, rs149827043, rs149830956, rs149831972, rs149838368, rs149842154, rs149848242, rs149850160, rs149858176, rs149867744, rs149875681, rs149895695, rs149896793, rs149897315, rs149897769, rs149898478, rs149899592, rs149901213, rs149916348, rs149923557, rs149934524, rs149948224, rs149951387, rs149959185, rs149961498, rs149963202, rs149964304, rs149968008, rs149970761, rs149975992, rs149978872, rs149985545, rs149993931, rs150013984, rs150019607, rs150022184, rs150025567, rs150030665, rs150033241, rs150036977, rs150038650, rs150041281, rs150044256, rs150046202, rs150046431, rs150053499, rs150068113, rs150078346, rs150079331, rs150085662, rs150086310, rs150091423, rs150112768, rs150125420, rs150130593, rs150131394, rs150134026, rs150137922, rs150144059, rs150147599, rs150147627, rs150152685, rs150160314, rs150184189, rs150194125, rs150198034, rs150199748, rs150202395, rs150210656, rs150212532, rs150213263, rs150214536, rs150220699, rs150222048, rs150222530, rs150222538, rs150237160, rs150243286, rs150259370, rs150267312, rs150270486, rs150273112, rs150281390, rs150282280, rs150286502, rs150286635, rs150289049, rs150309694, rs150320746, rs150326633, rs150333524, rs150337468, rs150347767, rs150349939, rs150350599, rs150357361, rs150357523, rs150359822, rs150360187, rs150361703, rs150363807, rs150367420, rs150394215, rs150397663, rs150403085, rs150405152, rs150412195, rs150412419, rs150421721, rs150422635, rs150423463, rs150427931, rs150431489, rs150469603, rs150473904, rs150478254, rs150480985, rs150482390, rs150484284, rs150493560, rs150497724, rs150502440, rs150519016, rs150522373, rs150525056, rs150526645, rs150531474, rs150533085, rs150536312, rs150538668, rs150546861, rs150549643, rs150575470, rs150582392, rs150586612, rs150590523, rs150590716, rs150596369, rs150596964, rs150599780, rs150602816, rs150604454, rs150604559, rs150611677, rs150632892, rs150644209, rs150648629, rs150655701, rs150660306, rs150662746, rs150671411, rs150673508, rs150676897, rs150676989, rs150682963, rs150685940, rs150691000, rs150697803, rs150711633, rs150730793, rs150733471, rs150735544, rs150736864, rs150739159, rs150743601, rs150746507, rs150748182, rs150749072, rs150752000, rs150753170, rs150756360, rs150792994, rs150797844, rs150798833, rs150798885, rs150803474, rs150806483, rs150808884, rs150810627, rs150812591, rs150814408, rs150817906, rs150818847, rs150822268, rs150823244, rs150829508, rs150839682, rs150862292, rs150864217, rs150866444, rs150868009, rs150870620, rs150874008, rs150874586, rs150883689, rs150887617, rs150887703, rs150891027, rs150893764, rs150911283, rs150922558, rs150923031, rs150926922, rs150927637, rs150930995, rs150936419, rs150945378, rs150978392, rs150979301, rs150981021, rs150988222, rs150992333, rs150993082, rs150997385, rs151003245, rs151009169, rs151012876, rs151031701, rs151037217, rs151038492, rs151043309, rs151044243, rs151048176, rs151052213, rs151061130, rs151062581, rs151065131, rs151067222, rs151072365, rs151102396, rs151104606, rs151115248, rs151118548, rs151119275, rs151122514, rs151125667, rs151126557, rs151135526, rs151139073, rs151141601, rs151142247, rs151147979, rs151184478, rs151185870, rs151189587, rs151191751, rs151199929, rs151202509, rs151204799, rs151209695, rs151236216, rs151238783, rs151242277, rs151254038, rs151262262, rs151262500, rs151274358, rs151280823, rs151283085, rs151285649, rs151300179, rs151308262, rs151323829, rs151328502, rs151335535, rs151337858, rs180673221, rs180673500, rs180673822, rs180678602, rs180678750, rs180683635, rs180687196, rs180688154, rs180691355, rs180692954, rs180697694, rs180723910, rs180726355, rs180728011, rs180735611, rs180743617, rs180746193, rs180746913, rs180748164, rs180760540, rs180761897, rs180762189, rs180766121, rs180770227, rs180772936, rs180773708, rs180779697, rs180781856, rs180785825, rs180787361, rs180805056, rs180809004, rs180812647, rs180817099, rs180834967, rs180835726, rs180836029, rs180849932, rs180852740, rs180865616, rs180870148, rs180876554, rs180880892, rs180888563, rs180892910, rs180898233, rs180901137, rs180903704, rs180909005, rs180913429, rs180913597, rs180914391, rs180916868, rs180920614, rs180925068, rs180944949, rs180945021, rs180946663, rs180950140, rs180955078, rs180961681, rs180965684, rs180972032, rs180977522, rs180981117, rs180993170, rs180996781, rs181003713, rs181020090, rs181028329, rs181029089, rs181030323, rs181033418, rs181040944, rs181056515, rs181056848, rs181057645, rs181063218, rs181066388, rs181067463, rs181068297, rs181070346, rs181070729, rs181075201, rs181075522, rs181081930, rs181120433, rs181123922, rs181124829, rs181125435, rs181129854, rs181133214, rs181133948, rs181136531, rs181139864, rs181142888, rs181148537, rs181148823, rs181152430, rs181155271, rs181158890, rs181162933, rs181163753, rs181166373, rs181167223, rs181170657, rs181170852, rs181171346, rs181172006, rs181174653, rs181180102, rs181183754, rs181186710, rs181190677, rs181197262, rs181201181, rs181204733, rs181208869, rs181215637, rs181225089, rs181238771, rs181239405, rs181247042, rs181253509, rs181256425, rs181259691, rs181287889, rs181290962, rs181296006, rs181297722, rs181298358, rs181310574, rs181314714, rs181319278, rs181324842, rs181325415, rs181326081, rs181327725, rs181329803, rs181333448, rs181335090, rs181338428, rs181344057, rs181348680, rs181350283, rs181354633, rs181355965, rs181357835, rs181358904, rs181362299, rs181363679, rs181364124, rs181368252, rs181375163, rs181377304, rs181381920, rs181387850, rs181388885, rs181392345, rs181394465, rs181400914, rs181414316, rs181417446, rs181434075, rs181435256, rs181438929, rs181442068, rs181443261, rs181453062, rs181472968, rs181488065, rs181497958, rs181505103, rs181516263, rs181516430, rs181518815, rs181524301, rs181525021, rs181531163, rs181541492, rs181552366, rs181555598, rs181558131, rs181558584, rs181558986, rs181560443, rs181573056, rs181578726, rs181590919, rs181616127, rs181619569, rs181639224, rs181641404, rs181649435, rs181652321, rs181660474, rs181662680, rs181664690, rs181671574, rs181673141, rs181681252, rs181683743, rs181683912, rs181685567, rs181687152, rs181688342, rs181691895, rs181693344, rs181698240, rs181698392, rs181698682, rs181706305, rs181710354, rs181710681, rs181711535, rs181714217, rs181716385, rs181724031, rs181762004, rs181769532, rs181769607, rs181782803, rs181794051, rs181798030, rs181798097, rs181799699, rs181800888, rs181803433, rs181805573, rs181807911, rs181808684, rs181809947, rs181812332, rs181814232, rs181817087, rs181827993, rs181839348, rs181839681, rs181850245, rs181854571, rs181858306, rs181864084, rs181864181, rs181875780, rs181882596, rs181883514, rs181883794, rs181887961, rs181893737, rs181895798, rs181902043, rs181904729, rs181905160, rs181905271, rs181907571, rs181907935, rs181908535, rs181911214, rs181913462, rs181914889, rs181916293, rs181925664, rs181926687, rs181932167, rs181934214, rs181940601, rs181942380, rs181949814, rs181959048, rs181970525, rs181981592, rs181986133, rs181991494, rs181998001, rs182013619, rs182018304, rs182021936, rs182044840, rs182045799, rs182051351, rs182057446, rs182060133, rs182064878, rs182065642, rs182068015, rs182073122, rs182073486, rs182079089, rs182082021, rs182103800, rs182116038, rs182119564, rs182120874, rs182126346, rs182129204, rs182131524, rs182138380, rs182144075, rs182147092, rs182154439, rs182154841, rs182161778, rs182168756, rs182174559, rs182184966, rs182188936, rs182196822, rs182196958, rs182198391, rs182200898, rs182204467, rs182208923, rs182221247, rs182221300, rs182221910, rs182223278, rs182225127, rs182229933, rs182236896, rs182245805, rs182262160, rs182262295, rs182305292, rs182311776, rs182313429, rs182317253, rs182319485, rs182320792, rs182331644, rs182333754, rs182335576, rs182337503, rs182337774, rs182341154, rs182343404, rs182345256, rs182348087, rs182350493, rs182353751, rs182358323, rs182367717, rs182368472, rs182369026, rs182371535, rs182372827, rs182376626, rs182378156, rs182383139, rs182384263, rs182386509, rs182388655, rs182392597, rs182393837, rs182407350, rs182416417, rs182418848, rs182421660, rs182437295, rs182451262, rs182460203, rs182470671, rs182472814, rs182478257, rs182488918, rs182496032, rs182503126, rs182517508, rs182534037, rs182537292, rs182539195, rs182539361, rs182540482, rs182541489, rs182543969, rs182547648, rs182558734, rs182559720, rs182574339, rs182574456, rs182580616, rs182580891, rs182581265, rs182585855, rs182586182, rs182592999, rs182601579, rs182603393, rs182605123, rs182610980, rs182618098, rs182618368, rs182619164, rs182619330, rs182620666, rs182622971, rs182628444, rs182629738, rs182630624, rs182634821, rs182636872, rs182639631, rs182656061, rs182659606, rs182663029, rs182666889, rs182671360, rs182673274, rs182685251, rs182688887, rs182690985, rs182700409, rs182717632, rs182720824, rs182721035, rs182724237, rs182728178, rs182728285, rs182730554, rs182739680, rs182739891, rs182743857, rs182747233, rs182754399, rs182758771, rs182759447, rs182761891, rs182762857, rs182765641, rs182769429, rs182771752, rs182774318, rs182775511, rs182781354, rs182786863, rs182787515, rs182793025, rs182793953, rs182794574, rs182800510, rs182801550, rs182803912, rs182807462, rs182811595, rs182815019, rs182833344, rs182838592, rs182839205, rs182844900, rs182854132, rs182857999, rs182880204, rs182887348, rs182889357, rs182893594, rs182899745, rs182903135, rs182926966, rs182932109, rs182933375, rs182933748, rs182935207, rs182936360, rs182939402, rs182942134, rs182944967, rs182945279, rs182958473, rs182961535, rs182968744, rs182972695, rs182981240, rs182993779, rs182994313, rs182998104, rs183011906, rs183014930, rs183017263, rs183019662, rs183021154, rs183029807, rs183034821, rs183040459, rs183043787, rs183051468, rs183051540, rs183076982, rs183079437, rs183108243, rs183124680, rs183135975, rs183137403, rs183147356, rs183151781, rs183153469, rs183153769, rs183159036, rs183160298, rs183162930, rs183164512, rs183167235, rs183168323, rs183173291, rs183175230, rs183176450, rs183183076, rs183183400, rs183183730, rs183184773, rs183186618, rs183189674, rs183190055, rs183192812, rs183193179, rs183195780, rs183204158, rs183206068, rs183208079, rs183211123, rs183214799, rs183215658, rs183218025, rs183218438, rs183222020, rs183224060, rs183228463, rs183228632, rs183230883, rs183232265, rs183237231, rs183243302, rs183243375, rs183245008, rs183250451, rs183251484, rs183254689, rs183256131, rs183259003, rs183263841, rs183274492, rs183280663, rs183289299, rs183293120, rs183296197, rs183304505, rs183309016, rs183309149, rs183309947, rs183322052, rs183324006, rs183329401, rs183332881, rs183337639, rs183337946, rs183352242, rs183355739, rs183356897, rs183365435, rs183366393, rs183371582, rs183373271, rs183379661, rs183386118, rs183389829, rs183390202, rs183391951, rs183393312, rs183410103, rs183411106, rs183414835, rs183420663, rs183434412, rs183444125, rs183446054, rs183453825, rs183457394, rs183457964, rs183462679, rs183463101, rs183467362, rs183471250, rs183474553, rs183476134, rs183476529, rs183478601, rs183492114, rs183494146, rs183520742, rs183523959, rs183524508, rs183534471, rs183535179, rs183537898, rs183542309, rs183549386, rs183557269, rs183570367, rs183592755, rs183598866, rs183608309, rs183613683, rs183615213, rs183620747, rs183625723, rs183628045, rs183630843, rs183632021, rs183633325, rs183641393, rs183641417, rs183644484, rs183647206, rs183652118, rs183658699, rs183663744, rs183679005, rs183693743, rs183704272, rs183705758, rs183707610, rs183710987, rs183711689, rs183715951, rs183716975, rs183719725, rs183720244, rs183721031, rs183724291, rs183732435, rs183733440, rs183735141, rs183740147, rs183741475, rs183754897, rs183755320, rs183767021, rs183768809, rs183777207, rs183779074, rs183786875, rs183790493, rs183790598, rs183791899, rs183796263, rs183797708, rs183802449, rs183808699, rs183825537, rs183827510, rs183829581, rs183834518, rs183835577, rs183840228, rs183850614, rs183856272, rs183859034, rs183864704, rs183864905, rs183867974, rs183871750, rs183874939, rs183875410, rs183875560, rs183880218, rs183881314, rs183890063, rs183896689, rs183897283, rs183902057, rs183903473, rs183907938, rs183908302, rs183910361, rs183912629, rs183916682, rs183918531, rs183919534, rs183921795, rs183930347, rs183931858, rs183932333, rs183935530, rs183935842, rs183940671, rs183940744, rs183943314, rs183951120, rs183956896, rs183965569, rs183968739, rs183968818, rs183971714, rs183972627, rs183988343, rs183989165, rs184010902, rs184013881, rs184016439, rs184021262, rs184021881, rs184024778, rs184042887, rs184042924, rs184054121, rs184058365, rs184059786, rs184068805, rs184069019, rs184072728, rs184077569, rs184077784, rs184078384, rs184082563, rs184082656, rs184101519, rs184104990, rs184115834, rs184118477, rs184119990, rs184121760, rs184124415, rs184140954, rs184141972, rs184147710, rs184158458, rs184167978, rs184178443, rs184207451, rs184213336, rs184218855, rs184239350, rs184241059, rs184243762, rs184254652, rs184260977, rs184278172, rs184284962, rs184286478, rs184299599, rs184302073, rs184305110, rs184308396, rs184312474, rs184313267, rs184323756, rs184327093, rs184328305, rs184334214, rs184337336, rs184337887, rs184341488, rs184350872, rs184353096, rs184355682, rs184357541, rs184357916, rs184364405, rs184365018, rs184366129, rs184382662, rs184382813, rs184382845, rs184387490, rs184390313, rs184393791, rs184395724, rs184399203, rs184403079, rs184407828, rs184420091, rs184420473, rs184422752, rs184423335, rs184432786, rs184433968, rs184435350, rs184435768, rs184437138, rs184437802, rs184438857, rs184441915, rs184442331, rs184443914, rs184453225, rs184455332, rs184465411, rs184469276, rs184475815, rs184495738, rs184502546, rs184512518, rs184513809, rs184517471, rs184517907, rs184519878, rs184522344, rs184534127, rs184534604, rs184538855, rs184542173, rs184543370, rs184544741, rs184554653, rs184561865, rs184585634, rs184591463, rs184594795, rs184605556, rs184620389, rs184635283, rs184636979, rs184642824, rs184658056, rs184659185, rs184659422, rs184661037, rs184665070, rs184665405, rs184666962, rs184671559, rs184678570, rs184685663, rs184687867, rs184693068, rs184695148, rs184709572, rs184710856, rs184713429, rs184714399, rs184719572, rs184736037, rs184742152, rs184748206, rs184755817, rs184757686, rs184774012, rs184778442, rs184780287, rs184785323, rs184787392, rs184793801, rs184794648, rs184794758, rs184797078, rs184800703, rs184803933, rs184806653, rs184808123, rs184808913, rs184812692, rs184813434, rs184816928, rs184822678, rs184827309, rs184838507, rs184838975, rs184840638, rs184842726, rs184843797, rs184846303, rs184848338, rs184849046, rs184851287, rs184854401, rs184856688, rs184863188, rs184865880, rs184869081, rs184870553, rs184873100, rs184875546, rs184876011, rs184881113, rs184901447, rs184903000, rs184907128, rs184908677, rs184915379, rs184919426, rs184921244, rs184925477, rs184931997, rs184935299, rs184937552, rs184941683, rs184942354, rs184948990, rs184953659, rs184954041, rs184957762, rs184958563, rs184960880, rs184962970, rs184963946, rs184964919, rs184965251, rs184967334, rs184969714, rs184970398, rs184971393, rs184979510, rs184985146, rs184995944, rs184997000, rs184999569, rs185001338, rs185005096, rs185006810, rs185009221, rs185019319, rs185031380, rs185041743, rs185055298, rs185059073, rs185084941, rs185103243, rs185108901, rs185112926, rs185116881, rs185137662, rs185139467, rs185139912, rs185140723, rs185144050, rs185145482, rs185147713, rs185151902, rs185153800, rs185155145, rs185155355, rs185160325, rs185162920, rs185166415, rs185176872, rs185206643, rs185206957, rs185240876, rs185258406, rs185260334, rs185263120, rs185266682, rs185275451, rs185291111, rs185292759, rs185296714, rs185301122, rs185303477, rs185305772, rs185309019, rs185314527, rs185326116, rs185326363, rs185336655, rs185340557, rs185346432, rs185348616, rs185353969, rs185364140, rs185368572, rs185373120, rs185382278, rs185383020, rs185383414, rs185389796, rs185411867, rs185412725, rs185417513, rs185419727, rs185422502, rs185429741, rs185433584, rs185440735, rs185441471, rs185447426, rs185449748, rs185450914, rs185451769, rs185452471, rs185453465, rs185455818, rs185457874, rs185459162, rs185460606, rs185460917, rs185461675, rs185464735, rs185472677, rs185474975, rs185480270, rs185482467, rs185483832, rs185488486, rs185498334, rs185499796, rs185509205, rs185509794, rs185516215, rs185520877, rs185529621, rs185531508, rs185536938, rs185539143, rs185540448, rs185543707, rs185544252, rs185544892, rs185546598, rs185552808, rs185553569, rs185556465, rs185557125, rs185561778, rs185567863, rs185578141, rs185579207, rs185582159, rs185582759, rs185588308, rs185590957, rs185597236, rs185598427, rs185600741, rs185602771, rs185605308, rs185606178, rs185607722, rs185607836, rs185614843, rs185615471, rs185616447, rs185624850, rs185628867, rs185637168, rs185637361, rs185643060, rs185663446, rs185663592, rs185677025, rs185678279, rs185683304, rs185691165, rs185694992, rs185697084, rs185698570, rs185702313, rs185706566, rs185707165, rs185710980, rs185716981, rs185719358, rs185728557, rs185733236, rs185743535, rs185749456, rs185749774, rs185753906, rs185754423, rs185756166, rs185758612, rs185785442, rs185786989, rs185789143, rs185803103, rs185809739, rs185810012, rs185816190, rs185819390, rs185821862, rs185824704, rs185826736, rs186137218, rs186139291, rs186149376, rs186151380, rs186159729, rs186161561, rs186167511, rs186167825, rs186176972, rs186182949, rs186185512, rs186187671, rs186191889, rs186200101, rs186204253, rs186204687, rs186205304, rs186216379, rs186221607, rs186222452, rs186262503, rs186265360, rs186266958, rs186271684, rs186276244, rs186282550, rs186284044, rs186305676, rs186310853, rs186340376, rs186351777, rs186358960, rs186134541, rs186127999, rs186124217, rs186121625, rs186118281, rs186113654, rs186112453, rs186105603, rs186104551, rs186097360, rs186095238, rs186095023, rs186087684, rs186085505, rs186085265, rs186079465, rs186079126, rs186077890, rs186075168, rs186062499, rs186058305, rs186054232, rs186052933, rs186050784, rs186047538, rs186045934, rs186043406, rs186041868, rs186036346, rs186026076, rs186020127, rs186016071, rs186014068, rs186013076, rs186012429, rs186009986, rs186004838, rs186001261, rs185997935, rs185992311, rs185990368, rs185989042, rs185984039, rs185969552, rs185964256, rs185950114, rs185944600, rs185934055, rs185929906, rs185926897, rs185918222, rs185911895, rs185910196, rs185901524, rs185901347, rs185900882, rs185892850, rs185891591, rs185876041, rs185875415, rs185873837, rs185861830, rs185859348, rs185855356, rs185852861, rs185838998, rs185834939, rs185832161, rs186361477, rs186363606, rs186363732, rs186367501, rs186367860, rs186370373, rs186371112, rs186374275, rs186377943, rs186379034, rs186382094, rs186385763, rs186387680, rs186394107, rs186400283, rs186405262, rs186423130, rs186423344, rs186424713, rs186426137, rs186430766, rs186435004, rs186436907, rs186440837, rs186451000, rs186456626, rs186462092, rs186462202, rs186462925, rs186467027, rs186478901, rs186483056, rs186488874, rs186495093, rs186495631, rs186502062, rs186509179, rs186510098, rs186513736, rs186513878, rs186514498, rs186515562, rs186519576, rs186521108, rs186526056, rs186529604, rs186533314, rs186538779, rs186542717, rs186545274, rs186547314, rs186549440, rs186550924, rs186557304, rs186572528, rs186575256, rs186581999, rs186582692, rs186586321, rs186589542, rs186598065, rs186601423, rs186605497, rs186607073, rs186607219, rs186610359, rs186610863, rs186614064, rs186616619, rs186618658, rs186624550, rs186625976, rs186631174, rs186634033, rs186635991, rs186637493, rs186641286, rs186655954, rs186657347, rs186662029, rs186665732, rs186668426, rs186672764, rs186679697, rs186682791, rs186693202, rs186693805, rs186697679, rs186701271, rs186709536, rs186716059, rs186717429, rs186719820, rs186726778, rs186726878, rs186729675, rs186738640, rs186739574, rs186746105, rs186748300, rs186752093, rs186754283, rs186756195, rs186757727, rs186758553, rs186760425, rs186762169, rs186764255, rs186767971, rs186771746, rs186772687, rs186774847, rs186777146, rs186777477, rs186784560, rs186786568, rs186799827, rs186807478, rs186811321, rs186812202, rs186817995, rs186822764, rs186823536, rs186838093, rs186843192, rs186855275, rs186857888, rs186881623, rs186882983, rs186884970, rs186899315, rs186901297, rs186907931, rs186914867, rs186916934, rs186939045, rs186946447, rs186957805, rs186969521, rs186975374, rs186977061, rs186988787, rs187002093, rs187007853, rs187012473, rs187013147, rs187013646, rs187018495, rs187021034, rs187027885, rs187030725, rs187035779, rs187049088, rs187049743, rs187052201, rs187054351, rs187054543, rs187057277, rs187064652, rs187068829, rs187069797, rs187073154, rs187073466, rs187093533, rs187097231, rs187098295, rs187099834, rs187102812, rs187107161, rs187108489, rs187124948, rs187138738, rs187146657, rs187147328, rs187152366, rs187157440, rs187166990, rs187167969, rs187168380, rs187168857, rs187174316, rs187179665, rs187183164, rs187187150, rs187192491, rs187192728, rs187193249, rs187193752, rs187196452, rs187205145, rs187205814, rs187209895, rs187215493, rs187225499, rs187227738, rs187228094, rs187229179, rs187230275, rs187231282, rs187238908, rs187242546, rs187243218, rs187244348, rs187244447, rs187244728, rs187244950, rs187248348, rs187250662, rs187250700, rs187250888, rs187252403, rs187252554, rs187253377, rs187255526, rs187258704, rs187258962, rs187275142, rs187281560, rs187285635, rs187285905, rs187300317, rs187301391, rs187310761, rs187328626, rs187328757, rs187329682, rs187347333, rs187348497, rs187358952, rs187366891, rs187377898, rs187381925, rs187392873, rs187394090, rs187396113, rs187405456, rs187408683, rs187412962, rs187414522, rs187414861, rs187415415, rs187426937, rs187441202, rs187448950, rs187449449, rs187454912, rs187457920, rs187460481, rs187462735, rs187475046, rs187475772, rs187477870, rs187482465, rs187484326, rs187490945, rs187492198, rs187492340, rs187501386, rs187501766, rs187512217, rs187517062, rs187528149, rs187529721, rs187560037, rs187569154, rs187571115, rs187575388, rs187580640, rs187586239, rs187586622, rs187588887, rs187592402, rs187598679, rs187600035, rs187602571, rs187603467, rs187604539, rs187604915, rs187608112, rs187609569, rs187613347, rs187616927, rs187619605, rs187620205, rs187620814, rs187623122, rs187633696, rs187634116, rs187637600, rs187638543, rs187640316, rs187644462, rs187646798, rs187647807, rs187657012, rs187658943, rs187670247, rs187688910, rs187693562, rs187701040, rs187701260, rs187703081, rs187704127, rs187729586, rs187732544, rs187734170, rs187744824, rs187745771, rs187749497, rs187752051, rs187756967, rs187760391, rs187761980, rs187763453, rs187766261, rs187772019, rs187776300, rs187779538, rs187794519, rs187796594, rs187798897, rs187801215, rs187814369, rs187819253, rs187825447, rs187830671, rs187838789, rs187849084, rs187850683, rs187867413, rs187869144, rs187872825, rs187877715, rs187878182, rs187880262, rs187885399, rs187894793, rs187901132, rs187906008, rs187910571, rs187911228, rs187920878, rs187927026, rs187927153, rs187928655, rs187931927, rs187942973, rs187947750, rs187956550, rs187963139, rs187970766, rs187976545, rs187982395, rs187984344, rs187991721, rs187993113, rs188020536, rs188022653, rs188028813, rs188032192, rs188033271, rs188037491, rs188038706, rs188041518, rs188043518, rs188045427, rs188048626, rs188053003, rs188059887, rs188061068, rs188061098, rs188061728, rs188064095, rs188068300, rs188068964, rs188069200, rs188069926, rs188073326, rs188088361, rs188089122, rs188100989, rs188107961, rs188116458, rs188122744, rs188125363, rs188128428, rs188129086, rs188130621, rs188131299, rs188143740, rs188147811, rs188153209, rs188157539, rs188159083, rs188161037, rs188169769, rs188170365, rs188172478, rs188175706, rs188176231, rs188176912, rs188180079, rs188182426, rs188182592, rs188184703, rs188188527, rs188197356, rs188204657, rs188212575, rs188217235, rs188223268, rs188231843, rs188233119, rs188241493, rs188244175, rs188261653, rs188265867, rs188271517, rs188271973, rs188276081, rs188291059, rs188302070, rs188302846, rs188307075, rs188314951, rs188321271, rs188331416, rs188333790, rs188334291, rs188334733, rs188337475, rs188338147, rs188340244, rs188340631, rs188343162, rs188346344, rs188349502, rs188350123, rs188354690, rs188355149, rs188356357, rs188357535, rs188359586, rs188359803, rs188362194, rs188365084, rs188366788, rs188369338, rs188371355, rs188372675, rs188379481, rs188381681, rs188382192, rs188404880, rs188406705, rs188414650, rs188418166, rs188429163, rs188429776, rs188430564, rs188432402, rs188446000, rs188446528, rs188460232, rs188489610, rs188491109, rs188501376, rs188519696, rs188522540, rs188523693, rs188530364, rs188536796, rs188540528, rs188546554, rs188549496, rs188552963, rs188554506, rs188557134, rs188573328, rs188577627, rs188579192, rs188579843, rs188582830, rs188583607, rs188589153, rs188599963, rs188604621, rs188608146, rs188611493, rs188615190, rs188622355, rs188623391, rs188625249, rs188629222, rs188631717, rs188651038, rs188661719, rs188665791, rs188668266, rs188674355, rs188691390, rs188704098, rs188708118, rs188711580, rs188718382, rs188718562, rs188719569, rs188724239, rs188728424, rs188729786, rs188734759, rs188738773, rs188742623, rs188761800, rs188777311, rs188781060, rs188783590, rs188784110, rs188789406, rs188798011, rs188800945, rs188803236, rs188804029, rs188812012, rs188812203, rs188815799, rs188816176, rs188816514, rs188823805, rs188824175, rs188826828, rs188839199, rs188839822, rs188841422, rs188843381, rs188848364, rs188848567, rs188855755, rs188856469, rs188858797, rs188863449, rs188863632, rs188866101, rs188870233, rs188875581, rs188876971, rs188877465, rs188881786, rs188885489, rs188890156, rs188891876, rs188897277, rs188906390, rs188918676, rs188939060, rs188953602, rs188954146, rs188959749, rs188966353, rs188968350, rs188976405, rs188980775, rs188981688, rs188983482, rs188986269, rs188991688, rs188992333, rs188996554, rs188997996, rs188998711, rs189000523, rs189003916, rs189005640, rs189007836, rs189008646, rs189013979, rs189014225, rs189017392, rs189024778, rs189033104, rs189039508, rs189043247, rs189046791, rs189049862, rs189073429, rs189077281, rs189079529, rs189086328, rs189087240, rs189090333, rs189090592, rs189091081, rs189096100, rs189103712, rs189107128, rs189121303, rs189131054, rs189135050, rs189136608, rs189151354, rs189165574, rs189174834, rs189177795, rs189179747, rs189181687, rs189188409, rs189194373, rs189205342, rs189220109, rs189220897, rs189221955, rs189231967, rs189236140, rs189247299, rs189249679, rs189251361, rs189251729, rs189252159, rs189258419, rs189260077, rs189262042, rs189263597, rs189264331, rs189268040, rs189268076, rs189269026, rs189272164, rs189272661, rs189273351, rs189273650, rs189278200, rs189278463, rs189282756, rs189283171, rs189286878, rs189291045, rs189291239, rs189293640, rs189294842, rs189295678, rs189299295, rs189301716, rs189304345, rs189304369, rs189315074, rs189315601, rs189322353, rs189324218, rs189346743, rs189353763, rs189366992, rs189368876, rs189368961, rs189374390, rs189377280, rs189392223, rs189393850, rs189405216, rs189410931, rs189413448, rs189416262, rs189427653, rs189430271, rs189436347, rs189441428, rs189442819, rs189443330, rs189445933, rs189451449, rs189452724, rs189457259, rs189460007, rs189464122, rs189474333, rs189489680, rs189492730, rs189499421, rs189500712, rs189507755, rs189508177, rs189514124, rs189523619, rs189529310, rs189531317, rs189533663, rs189535789, rs189548424, rs189549170, rs189561331, rs189565802, rs189572802, rs189575615, rs189586310, rs189590066, rs189596212, rs189617421, rs189624571, rs189626813, rs189636480, rs189647464, rs189658072, rs189679318, rs189691225, rs189704925, rs189717247, rs189718453, rs189724669, rs189728652, rs189730657, rs189732527, rs189733181, rs189734003, rs189734060, rs189734423, rs189743134, rs189744185, rs189749996, rs189756984, rs189759551, rs189759716, rs189762710, rs189766117, rs189768181, rs189770366, rs189771497, rs189772669, rs189774336, rs189778208, rs189780589, rs189782839, rs189783192, rs189796291, rs189812673, rs189816911, rs189828567, rs189830393, rs189833573, rs189836401, rs189839901, rs189855741, rs189879418, rs189889573, rs189892306, rs189896753, rs189897267, rs189902791, rs189904194, rs189907847, rs189911085, rs189913043, rs189914916, rs189916575, rs189917597, rs189921023, rs189921141, rs189923705, rs189926493, rs189928986, rs189949257, rs189957579, rs189971366, rs189976050, rs189976199, rs189978736, rs189978909, rs189980374, rs189987228, rs189993161, rs189994447, rs189997395, rs189999511, rs190002224, rs190003712, rs190007886, rs190008478, rs190012292, rs190015061, rs190019638, rs190024344, rs190024841, rs190032129, rs190048493, rs190049695, rs190060491, rs190066073, rs190077705, rs190082739, rs190090967, rs190092534, rs190092927, rs190104645, rs190121056, rs190122959, rs190124851, rs190132711, rs190134397, rs190138467, rs190142451, rs190142680, rs190151803, rs190154750, rs190161080, rs190163413, rs190165837, rs190166573, rs190167776, rs190174578, rs190174771, rs190175479, rs190180599, rs190189417, rs190198654, rs190200312, rs190201145, rs190214615, rs190217174, rs190223625, rs190225397, rs190233075, rs190233278, rs190241257, rs190260579, rs190263520, rs190272523, rs190272775, rs190273215, rs190281453, rs190283154, rs190293023, rs190295478, rs190301309, rs190323160, rs190337549, rs190347189, rs190362395, rs190366111, rs190369659, rs190377522, rs190379329, rs190392330, rs190394223, rs190396972, rs190400675, rs190400876, rs190402688, rs190405683, rs190407745, rs190410278, rs190410372, rs190410468, rs190412394, rs190413131, rs190413494, rs190413991, rs190415473, rs190415518, rs190419055, rs190420816, rs190421433, rs190422533, rs190424693, rs190427860, rs190447020, rs190449694, rs190455660, rs190462120, rs190466285, rs190466379, rs190468675, rs190474164, rs190475885, rs190476789, rs190478463, rs190481908, rs190482122, rs190483542, rs190491609, rs190494819, rs190496033, rs190503249, rs190530167, rs190533533, rs190533727, rs190548241, rs190548341, rs190548728, rs190549897, rs190553325, rs190555325, rs190559005, rs190561598, rs190568232, rs190568999, rs190569400, rs190570635, rs190601562, rs190605141, rs190606256, rs190617006, rs190628543, rs190634102, rs190637276, rs190638105, rs190638445, rs190638608, rs190638620, rs190640064, rs190640636, rs190640771, rs190644754, rs190646014, rs190646070, rs190646127, rs190650249, rs190651699, rs190656144, rs190660161, rs190660756, rs190672203, rs190687733, rs190692281, rs190695603, rs190700165, rs190703489, rs190714400, rs190715511, rs190723587, rs190725225, rs190725443, rs190725775, rs190730207, rs190731637, rs190741689, rs190780032, rs190786824, rs190788193, rs190790303, rs190790409, rs190806197, rs190813628, rs190822200, rs190822390, rs190828672, rs190830195, rs190836120, rs190838960, rs190840305, rs190853404, rs190859977, rs190874400, rs190874948, rs190876051, rs190881703, rs190885747, rs190886276, rs190888059, rs190891999, rs190894784, rs190906095, rs190909221, rs190914008, rs190917860, rs190919641, rs190922411, rs190922597, rs190931348, rs190932882, rs190934776, rs190942451, rs190943442, rs190945886, rs190946924, rs190949151, rs190954226, rs190957825, rs190966728, rs190973713, rs190976341, rs190979814, rs190982590, rs190983295, rs190984748, rs190998786, rs191015868, rs191019815, rs191021785, rs191022334, rs191026374, rs191038053, rs191039689, rs191044322, rs191045441, rs191046194, rs191050216, rs191053038, rs191056776, rs191059543, rs191059772, rs191060922, rs191067356, rs191070590, rs191072002, rs191077602, rs191078576, rs191082034, rs191082424, rs191094197, rs191102441, rs191104311, rs191108007, rs191119759, rs191124496, rs191129876, rs191134079, rs191135832, rs191141241, rs191142883, rs191144019, rs191145040, rs191148738, rs191150735, rs191151121, rs191152602, rs191157030, rs191159088, rs191166753, rs191166788, rs191179597, rs191182636, rs191185654, rs191203082, rs191212467, rs191213370, rs191214811, rs191215452, rs191220941, rs191226996, rs191229132, rs191230333, rs191241416, rs191242903, rs191244000, rs191248185, rs191250994, rs191255573, rs191260455, rs191287725, rs191289543, rs191295969, rs191298245, rs191299193, rs191307491, rs191330536, rs191331061, rs191351500, rs191354671, rs191355311, rs191361824, rs191362341, rs191366020, rs191367952, rs191374453, rs191378614, rs191381463, rs191381867, rs191392745, rs191395109, rs191397557, rs191399258, rs191401884, rs191404795, rs191405220, rs191405307, rs191407331, rs191413759, rs191420129, rs191422133, rs191425832, rs191432597, rs191443570, rs191443657, rs191447628, rs191458160, rs191464492, rs191467882, rs191479186, rs191504795, rs191508768, rs191510216, rs191510887, rs191523305, rs191526798, rs191541499, rs191542415, rs191552462, rs191554970, rs191559373, rs191574568, rs191577355, rs191577544, rs191580591, rs191581317, rs191585526, rs191592910, rs191596109, rs191599228, rs191602116, rs191611996, rs191617365, rs191618487, rs191619756, rs191620113, rs191622071, rs191622424, rs191625713, rs191627988, rs191630796, rs191634106, rs191636998, rs191640212, rs191641055, rs191641185, rs191643131, rs191645452, rs191647602, rs191650812, rs191658318, rs191659962, rs191661001, rs191667576, rs191669796, rs191672498, rs191674934, rs191681325, rs191683137, rs191689331, rs191707489, rs191712660, rs191718206, rs191724737, rs191744185, rs191758768, rs191772818, rs191773424, rs191775641, rs191776879, rs191779630, rs191781885, rs191785268, rs191789953, rs191791859, rs191793541, rs191794761, rs191795594, rs191797126, rs191802201, rs191802770, rs191803049, rs191804647, rs191807823, rs191810104, rs191816480, rs191819285, rs191824060, rs191824264, rs191826071, rs191828361, rs191834668, rs191865987, rs191868943, rs191883918, rs191898570, rs191899712, rs191905656, rs191912891, rs191916046, rs191921299, rs191923996, rs191950427, rs191958737, rs191961554, rs191967951, rs191973552, rs191975368, rs191978532, rs191997080, rs191997706, rs191999411, rs192002336, rs192005739, rs192008184, rs192016378, rs192018603, rs192021132, rs192023786, rs192026016, rs192030568, rs192030669, rs192038550, rs192039340, rs192042874, rs192056300, rs192059186, rs192061465, rs192062242, rs192063370, rs192072296, rs192074411, rs192079918, rs192080872, rs192083673, rs192084116, rs192091408, rs192097113, rs192107432, rs192113869, rs192114787, rs192117530, rs192118828, rs192124735, rs192133793, rs192157942, rs192162202, rs192163407, rs192172131, rs192177126, rs192178727, rs192182330, rs192186469, rs192187196, rs192209241, rs192220721, rs192230555, rs192232173, rs192233342, rs192237973, rs192240736, rs192254782, rs192255355, rs192256681, rs192258473, rs192261097, rs192263036, rs192265333, rs192269015, rs192269330, rs192269516, rs192273519, rs192289106, rs192289179, rs192290321, rs192302693, rs192302746, rs192304257, rs192304751, rs192306621, rs192308221, rs192316585, rs192317605, rs192322070, rs192322344, rs192323767, rs192327258, rs192328111, rs192332918, rs192335533, rs192336058, rs192337684, rs192352660, rs192364738, rs192378285, rs192396548, rs192399182, rs192407648, rs192411199, rs192411207, rs192416494, rs192420014, rs192424362, rs192431660, rs192448908, rs192449271, rs192449998, rs192452108, rs192459943, rs192462433, rs192473594, rs192476507, rs192482608, rs192490530, rs192501659, rs192503263, rs192504731, rs192504843, rs192510527, rs192514820, rs192520784, rs192521612, rs192524696, rs192536582, rs192547057, rs192555521, rs192557082, rs192559205, rs192564519, rs192572777, rs192575976, rs192579945, rs192581941, rs192585864, rs192591298, rs192594444, rs192600035, rs192603312, rs192604759, rs192608008, rs192608662, rs192609446, rs192611444, rs192611976, rs192614231, rs192615747, rs192616711, rs192618167, rs192620254, rs192626489, rs192646041, rs192649867, rs192650285, rs192671778, rs192672030, rs192676396, rs192676855, rs192687677, rs192689968, rs192702103, rs192702948, rs192704212, rs192708997, rs192709748, rs192715630, rs192718806, rs192731887, rs192737977, rs192739947, rs192740040, rs192745044, rs192751982, rs192758603, rs192760263, rs192768164, rs192770104, rs192779345, rs192783280, rs192784639, rs192786978, rs192788032, rs192792131, rs192804434, rs192812647, rs192822025, rs192825064, rs192829715, rs192837775, rs192840063, rs192846877, rs192854661, rs192856518, rs192861959, rs192865407, rs192868612, rs192870045, rs192872234, rs192874472, rs192891884, rs192893558, rs192896133, rs192908773, rs192915419, rs192915976, rs192917441, rs192921846, rs192925306, rs192925663, rs192935723, rs192936864, rs192945355, rs192947108, rs192947763, rs192955994, rs192965653, rs192969610, rs192976805, rs192985595, rs192992787, rs192994235, rs192997614, rs193007867, rs193008111, rs193012417, rs193014871, rs193020046, rs193021060, rs193022867, rs193023813, rs193026991, rs193028945, rs193033083, rs193037788, rs193042963, rs193048250, rs193059727, rs193061115, rs193081740, rs193082776, rs193084980, rs193091974, rs193094330, rs193105191, rs193107804, rs193114822, rs193115922, rs193122504, rs193124288, rs193132486, rs193136439, rs193151478, rs193151506, rs193152697, rs193155721, rs193155952, rs193162879, rs193175004, rs193181365, rs193186204, rs193190274, rs193195850, rs193203020, rs193212507, rs193212516, rs193219974, rs193224613, rs193228834, rs193228939, rs193247109, rs193247518, rs193251561, rs193262417, rs193269052, rs193271412, rs193276711, rs193287043, rs193290418, rs193291875, rs193292430, rs193296578, rs193297691, rs199498342, rs199499023, rs199503835, rs199506804, rs199511740, rs199515550, rs199525316, rs199563386, rs199566018, rs199566831, rs199567726, rs199569397, rs199572297, rs199575316, rs199575580, rs199575933, rs199582028, rs199584997, rs199601179, rs199603985, rs199604443, rs199608139, rs199608639, rs199632635, rs199632959, rs199634836, rs199650817, rs199659369, rs199661797, rs199664406, rs199667878, rs199672534, rs199673008, rs199676897, rs199677109, rs199678207, rs199680653, rs199684313, rs199685776, rs199689858, rs199690868, rs199704483, rs199707071, rs199709946, rs199712274, rs199714288, rs199720578, rs199722462, rs199726173, rs199731028, rs199731071, rs199737313, rs199738698, rs199738818, rs199741761, rs199742212, rs199744364, rs199766113, rs199766726, rs199771692, rs199773264, rs199773649, rs199773732, rs199797275, rs199797875, rs199814707, rs199817178, rs199820369, rs199823835, rs199833683, rs199846930, rs199848709, rs199852325, rs199852761, rs199862399, rs199867621, rs199878847, rs199881607, rs199891520, rs199904029, rs199905856, rs199908756, rs199909576, rs199916215, rs199917541, rs199923294, rs199928851, rs199931560, rs199935293, rs199936418, rs199937451, rs199941322, rs199941935, rs199942891, rs199943893, rs199944321, rs199964623, rs199969745, rs199971979, rs199973515, rs199976097, rs199976187, rs199992815, rs199998517, rs200000142, rs200030296, rs200038401, rs200038968, rs200041890, rs200046402, rs200052736, rs200061516, rs200066310, rs200070623, rs200075509, rs200077211, rs200090176, rs200094005, rs200095274, rs200097756, rs200099750, rs200106535, rs200111194, rs200112752, rs200113382, rs200123250, rs200129656, rs200130489, rs200140103, rs200142123, rs200167997, rs200174642, rs200178875, rs200185784, rs200186156, rs200186541, rs200189166, rs200190380, rs200224359, rs200224891, rs200241408, rs200249852, rs200257353, rs200258069, rs200261620, rs200264486, rs200282477, rs200288072, rs200290155, rs200297838, rs200307542, rs200307601, rs200312952, rs200319423, rs200322745, rs200329221, rs200334736, rs200337904, rs200341138, rs200341736, rs200351747, rs200355894, rs200358695, rs200362241, rs200362292, rs200364360, rs200364660, rs200366007, rs200390361, rs200399444, rs200400935, rs200401115, rs200413891, rs200416026, rs200425996, rs200431049, rs200444769, rs200445994, rs200450097, rs200455884, rs200463258, rs200466422, rs200467477, rs200469923, rs200471298, rs200473996, rs200475205, rs200476242, rs200482323, rs200484667, rs200489142, rs200494143, rs200496509, rs200510072, rs200518204, rs200521777, rs200523573, rs200529103, rs200529505, rs200530571, rs200541266, rs200545536, rs200550457, rs200550594, rs200554786, rs200555417, rs200556068, rs200559111, rs200567333, rs200571890, rs200577878, rs200580776, rs200581054, rs200582139, rs200585779, rs200594538, rs200608299, rs200613206, rs200615399, rs200617659, rs200625655, rs200632791, rs200632940, rs200646230, rs200646276, rs200656395, rs200663849, rs200667464, rs200669208, rs200673924, rs200695338, rs200701932, rs200708064, rs200710385, rs200711461, rs200715040, rs200726308, rs200744281, rs200762685, rs200765242, rs200768192, rs200780219, rs200807675, rs200834447, rs200840814, rs200841688, rs200846045, rs200851669, rs200853002, rs200853530, rs200862961, rs200868974, rs200869699, rs200870111, rs200882438, rs200884388, rs200891272, rs200896437, rs200898063, rs200899983, rs200900181, rs200903307, rs200907135, rs200911794, rs200921233, rs200923373, rs200924477, rs200926100, rs200926860, rs200928844, rs200939383, rs200953311, rs200955099, rs200960409, rs200960948, rs200961385, rs200962063, rs200966657, rs200968333, rs200976751, rs200981076, rs200990733, rs200991920, rs200995222, rs200998564, rs201001702, rs201009816, rs201021575, rs201028180, rs201028930, rs201036337, rs201036504, rs201036739, rs201041913, rs201046207, rs201049224, rs201049865, rs201053205, rs201054270, rs201069695, rs201073825, rs201077717, rs201083703, rs201084443, rs201089661, rs201097089, rs201108332, rs201119913, rs201122410, rs201122556, rs201128354, rs201135219, rs201148477, rs201149159, rs201149641, rs201155392, rs201162084, rs201167089, rs201172088, rs201175472, rs201177178, rs201178493, rs201184846, rs201188972, rs201200054, rs201204005, rs201204464, rs201205701, rs201209372, rs201210188, rs201220236, rs201224985, rs201226052, rs201231668, rs201236591, rs201248317, rs201259724, rs201260459, rs201262666, rs201265215, rs201269292, rs201274232, rs201274841, rs201276704, rs201277327, rs201290392, rs201297897, rs201299745, rs201308510, rs201309072, rs201309701, rs201315018, rs201322079, rs201336767, rs201341889, rs201369270, rs201369484, rs201382419, rs201383908, rs201384137, rs201385890, rs201389499, rs201391981, rs201401599, rs201402165, rs201407884, rs201409997, rs201411662, rs201418628, rs201420653, rs201420954, rs201428663, rs201441302, rs201448371, rs201463185, rs201463398, rs201465213, rs201469349, rs201472719, rs201476557, rs201479337, rs201488789, rs201489401, rs201492379, rs201503862, rs201505274, rs201514199, rs201517186, rs201517228, rs201518199, rs201518895, rs201532154, rs201540948, rs201559586, rs201562255, rs201565953, rs201578157, rs201580703, rs201586144, rs201587923, rs201597970, rs201622431, rs201625640, rs201626587, rs201628863, rs201632009, rs201632636, rs201633660, rs201636278, rs201638947, rs201642979, rs201643443, rs201644745, rs201645881, rs201661795, rs201667209, rs201674034, rs201691836, rs201702468, rs201712197, rs201715201, rs201736351, rs201745192, rs201757251, rs201787324, rs201814504, rs201815731, rs201822182, rs201825539, rs201833533, rs201836262, rs201841697, rs201843056, rs201848617, rs201853235, rs201861539, rs201865436, rs201866320, rs201870611, rs201874099, rs201876469, rs201877007, rs201877199, rs201895002, rs201895025, rs201896346, rs201899179, rs201902793, rs201913996, rs201918511, rs201929852, rs201946370, rs201950207, rs201958039, rs201965833, rs201970154, rs201971829, rs201971962, rs201979275, rs201982350, rs201984588, rs201985406, rs201999073, rs202022740, rs202034278, rs202040849, rs202048629, rs202050052, rs202051106, rs202058214, rs202067517, rs202069361, rs202070788, rs202071695, rs202088245, rs202093372, rs202098959, rs202103980, rs202105513, rs202106611, rs202113960, rs202114141, rs202115948, rs202145764, rs202150411, rs202151118, rs202153640, rs202166403, rs202167293, rs202167911, rs202170509, rs202195205, rs202203606, rs202203951, rs202208536, rs202211500, rs202228071, rs202228469, rs202234656, rs202236684, rs202243267, rs202247790, rs202247791, rs202247792, rs207467442, rs207467443, rs207467444, rs267600801, rs367543365, rs367545786, rs367552449, rs367566091, rs367567538, rs367574875, rs367579392, rs367580926, rs367582168, rs367587135, rs367588717, rs367593724, rs367595513, rs367599018, rs367599698, rs367599752, rs367604253, rs367606409, rs369333003, rs369340152, rs369346844, rs369352245, rs369373637, rs369375099, rs369376381, rs369378015, rs369381843, rs369392004, rs369402894, rs369644046, rs369663959, rs369677897, rs369681942, rs369687145, rs369636770, rs369628508, rs369626357, rs369625627, rs369623334, rs369619061, rs369610687, rs369608756, rs369606954, rs369601586, rs369596431, rs369596190, rs369594880, rs369593098, rs369586149, rs369584929, rs369584287, rs369582534, rs369578623, rs369575809, rs369567245, rs369565164, rs369558532, rs369548755, rs369543342, rs369542490, rs369542299, rs369522415, rs369518080, rs369517736, rs369504737, rs369485691, rs369484625, rs369464360, rs369449702, rs369442930, rs369442807, rs369438208, rs369431072, rs369423486, rs369417098, rs369330958, rs369322492, rs369318237, rs369314620, rs369310845, rs369310839, rs369307945, rs369302757, rs369295174, rs369292071, rs369287515, rs369284574, rs369279273, rs369276423, rs369266768, rs369266370, rs369265851, rs369264318, rs369237946, rs369237545, rs369236824, rs369236049, rs369235713, rs369235138, rs369231875, rs369223256, rs369223251, rs369217203, rs369213374, rs369211286, rs369209387, rs369209036, rs368739510, rs368726141, rs368725544, rs368725543, rs368717147, rs368715292, rs368714412, rs368710697, rs368709864, rs368704086, rs368695074, rs368685474, rs368683624, rs368667774, rs368663648, rs368650870, rs368648667, rs368643251, rs368633681, rs368627906, rs368605639, rs368602625, rs368601017, rs368596949, rs368590484, rs368578573, rs368577739, rs368570421, rs368566012, rs368561315, rs368560655, rs368557745, rs368552768, rs368543072, rs368540419, rs368534834, rs368533310, rs368527493, rs368525512, rs368521678, rs368517143, rs368516450, rs368515695, rs368510564, rs368508477, rs368505869, rs368505608, rs368497582, rs368496395, rs368495847, rs368491112, rs368485691, rs368485232, rs368484096, rs368480979, rs368477934, rs368472419, rs368472099, rs368471027, rs368467579, rs368449678, rs368441320, rs368426281, rs368424266, rs368422466, rs368420107, rs368412639, rs368406526, rs368403128, rs368399908, rs368392686, rs368388051, rs368379947, rs368379507, rs368364480, rs368364361, rs368364038, rs368357968, rs368357906, rs368356753, rs368355146, rs368350551, rs368349321, rs368346422, rs368341027, rs368337034, rs368334998, rs368325295, rs368316367, rs368315661, rs368314300, rs368311687, rs368311592, rs368310395, rs368304359, rs368302854, rs368296936, rs368280138, rs368279703, rs368271332, rs368269442, rs368257636, rs368240500, rs368240215, rs368239834, rs368220896, rs368219203, rs368216086, rs368206799, rs368206084, rs368202766, rs368201975, rs368196552, rs368179149, rs368173164, rs368167658, rs368164336, rs368152489, rs368149552, rs368145720, rs368143247, rs368142462, rs368139658, rs368133018, rs368120033, rs368114052, rs368111713, rs368110852, rs368109221, rs368102675, rs368097147, rs368096908, rs368096866, rs368087621, rs368086451, rs368078865, rs368072921, rs368048657, rs368045195, rs368044459, rs368036891, rs368036244, rs368025542, rs368020969, rs370716267, rs370724881, rs370732591, rs370743057, rs370743643, rs370746996, rs370748726, rs370753514, rs370758392, rs370763981, rs370764795, rs370766822, rs370776516, rs370785200, rs370788840, rs370795614, rs370814688, rs370820423, rs370823633, rs370825276, rs370826486, rs368018971, rs368011783, rs368003978, rs367983016, rs367981807, rs367980938, rs367979054, rs367975430, rs367975031, rs367974153, rs367973646, rs367973563, rs367965831, rs367963240, rs367960200, rs367955060, rs367953258, rs367951249, rs367944312, rs367935212, rs367927663, rs367926961, rs367926736, rs367923028, rs367912457, rs367902886, rs367902558, rs367886953, rs367883416, rs367882337, rs367881598, rs367880792, rs367870255, rs367867055, rs367859894, rs367855154, rs367854577, rs367852550, rs367851647, rs367844060, rs367841520, rs367841133, rs367838767, rs367830310, rs367802345, rs367801824, rs367799209, rs367791068, rs367789905, rs367772544, rs367768515, rs367765202, rs367763424, rs367759352, rs367757515, rs367757227, rs367748467, rs367727480, rs367725387, rs367717756, rs367717081, rs367707899, rs367696686, rs367692205, rs367678715, rs367665929, rs367665458, rs367664941, rs367658196, rs367655399, rs367654534, rs367649998, rs367649718, rs367641765, rs367641522, rs367639107, rs367622987, rs367622689, rs367618465, rs367617665, rs367613452, rs367607541, rs369692562, rs369692779, rs369698015, rs369699817, rs369705733, rs369707702, rs369707756, rs369712440, rs369724867, rs369728989, rs369745832, rs369752565, rs369754204, rs369757657, rs369759691, rs369760070, rs369761137, rs369766636, rs369766767, rs369767234, rs369769253, rs369776766, rs369783020, rs369805884, rs369806484, rs369807523, rs369812593, rs369816636, rs369818291, rs369819266, rs369819286, rs369822081, rs369825999, rs369833663, rs369836534, rs369840324, rs369844177, rs369853965, rs369855231, rs369857735, rs369858448, rs369861285, rs369862238, rs369865181, rs369865253, rs369865527, rs369867051, rs369867781, rs369871198, rs371440265, rs371442652, rs371444951, rs371450643, rs371453383, rs371453899, rs371457396, rs371462334, rs371470046, rs371478387, rs371479320, rs369871445, rs369875621, rs369875807, rs369876737, rs369882354, rs369886934, rs369898782, rs369903742, rs369913005, rs369916946, rs369918007, rs369921468, rs369922951, rs369924591, rs369940052, rs369947128, rs369951185, rs369952984, rs369965124, rs369966149, rs369967700, rs369973967, rs369974720, rs369978524, rs369978622, rs369208346, rs369206899, rs369189085, rs369180980, rs369173903, rs369173653, rs369172101, rs369171689, rs369170115, rs369169179, rs369165681, rs369161157, rs369157208, rs369154413, rs369140200, rs369138881, rs369133977, rs369129942, rs369125303, rs369124849, rs369122505, rs369121494, rs369109271, rs369098166, rs369093982, rs369088366, rs369082375, rs369079918, rs369079916, rs369079422, rs369076029, rs369073493, rs369072771, rs369070913, rs369064672, rs369064513, rs369062390, rs369060960, rs369057810, rs369056068, rs369055256, rs369051362, rs369051174, rs369050638, rs369049149, rs369042875, rs369040987, rs369038869, rs369038468, rs369036336, rs369034590, rs369031769, rs369002756, rs369000669, rs368998700, rs368996804, rs368989339, rs368985017, rs368981182, rs368975713, rs368972318, rs368959583, rs368959119, rs368951614, rs368941367, rs368933391, rs368928814, rs368922365, rs368914319, rs368912908, rs368911205, rs368904015, rs368899687, rs368895765, rs368885266, rs368882129, rs368881005, rs368878975, rs368878784, rs368875502, rs368865116, rs368857945, rs368851019, rs368850090, rs368840301, rs368817743, rs368817446, rs368817337, rs368809364, rs368792867, rs368788184, rs368781972, rs368774770, rs368770015, rs368766845, rs368766210, rs368765545, rs368757363, rs368754797, rs368751791, rs369978926, rs369984289, rs369990625, rs369999286, rs370007804, rs370010828, rs370011079, rs370011968, rs370026035, rs370029225, rs370031258, rs370035957, rs370038378, rs370055114, rs370055784, rs370057081, rs370059061, rs370079119, rs370088275, rs370100651, rs370103046, rs370106278, rs370110070, rs370116671, rs370132838, rs370136803, rs370137946, rs370150489, rs370150640, rs370150883, rs370158412, rs370160542, rs370168820, rs370170385, rs370181512, rs370181941, rs370184815, rs370189605, rs370197248, rs370197580, rs370209800, rs370209868, rs370213196, rs370214544, rs370215842, rs370217986, rs370218452, rs370219488, rs370220562, rs370220591, rs370221817, rs370225841, rs370234306, rs370239469, rs370262586, rs370267032, rs370270706, rs370270987, rs370273850, rs370280319, rs370282489, rs370283819, rs370284624, rs370287176, rs370295124, rs370295490, rs370301971, rs370311720, rs370312995, rs370316561, rs370320970, rs370326594, rs370334822, rs370336657, rs370340829, rs370344012, rs370367433, rs370371259, rs370380123, rs370381250, rs370382483, rs370383034, rs370383672, rs370385574, rs370390314, rs370398629, rs370400466, rs370401113, rs370402446, rs370404742, rs370406703, rs370413273, rs370418379, rs370420832, rs370421399, rs370432973, rs370435981, rs370436493, rs370436759, rs370449974, rs370458956, rs370460812, rs370461121, rs370461209, rs370464069, rs370471095, rs370476491, rs370484418, rs370489955, rs370495347, rs370498689, rs370499258, rs370501745, rs370505702, rs370509530, rs370518019, rs370518930, rs370522918, rs370558049, rs370561771, rs370562131, rs370565642, rs372620674, rs372623703, rs372632684, rs372637233, rs372640854, rs372642515, rs372654060, rs372654140, rs370566215, rs370566503, rs370567044, rs370571869, rs370572611, rs370576757, rs370580907, rs370590459, rs370601545, rs370622414, rs370625897, rs370633279, rs370635718, rs370637329, rs370657459, rs370685104, rs370689136, rs370691060, rs370694473, rs370708413, rs370709137, rs370826738, rs370844268, rs370850133, rs370852090, rs370854386, rs370864113, rs370865704, rs370876783, rs370879703, rs370880272, rs370884919, rs370885864, rs371206726, rs371207548, rs371212434, rs371217987, rs371219965, rs371223339, rs371223682, rs371245638, rs371248264, rs371248596, rs371250084, rs371253167, rs371258980, rs371259411, rs371264140, rs371264680, rs371276000, rs371286688, rs371291733, rs371306445, rs371308362, rs371320212, rs371334734, rs371339192, rs371342769, rs371348322, rs371352656, rs371359973, rs371365485, rs371376404, rs371377683, rs371381470, rs371382238, rs371384268, rs371387446, rs371388948, rs371391089, rs371398633, rs371403343, rs371403883, rs371404086, rs371405470, rs371406013, rs371413083, rs371420499, rs371423399, rs371425639, rs371438707, rs371480756, rs371482245, rs371486054, rs371486679, rs371490861, rs371494802, rs371498051, rs371500348, rs371501481, rs371505718, rs371511203, rs371516594, rs371530944, rs371531940, rs371533895, rs371535455, rs371535597, rs371539779, rs371548755, rs371550497, rs371561944, rs371568325, rs371569120, rs371581503, rs371592351, rs371601174, rs371611609, rs371611999, rs371612309, rs371618787, rs371619197, rs371621793, rs371622751, rs371627663, rs371627972, rs371629354, rs371631233, rs371634714, rs371637061, rs371637968, rs371645941, rs371657321, rs371660352, rs371661779, rs371662476, rs371670491, rs371672203, rs371682826, rs371689031, rs371690628, rs371691574, rs371694178, rs371697379, rs371698564, rs371701050, rs371702942, rs371716781, rs371719705, rs371721302, rs371724487, rs371731311, rs371735280, rs371735801, rs371739718, rs371750785, rs371754374, rs371760431, rs371761314, rs371762018, rs371765568, rs371771913, rs371774676, rs371784677, rs371786008, rs371787062, rs371791646, rs371792471, rs371793393, rs371799171, rs371802638, rs371808920, rs371809639, rs371812414, rs371819745, rs371819889, rs371822775, rs371832557, rs371837142, rs371839110, rs371856164, rs371859402, rs371862693, rs371869694, rs371870405, rs371872959, rs371883776, rs371894429, rs371899475, rs371910653, rs371917155, rs371926874, rs371927609, rs371930132, rs371931600, rs371933359, rs371940258, rs371944692, rs371953658, rs371955364, rs371961862, rs371963923, rs371963979, rs371964123, rs371974847, rs371978089, rs371981703, rs371982060, rs371992775, rs371999013, rs372002253, rs372010935, rs372025466, rs372028707, rs372030760, rs372034931, rs372041953, rs372042488, rs372046114, rs372047771, rs372048727, rs372049866, rs372052166, rs372070910, rs372074443, rs372079311, rs372082586, rs372100070, rs372107950, rs372109206, rs372112265, rs372114394, rs372122978, rs372128807, rs372134711, rs372135119, rs372138860, rs372152153, rs372154347, rs372157577, rs372159463, rs372165332, rs372165543, rs372165994, rs372166099, rs372166540, rs372167383, rs372186967, rs372195855, rs372206788, rs372212378, rs372212765, rs372219177, rs372234618, rs372236924, rs372236926, rs372240436, rs372256542, rs372257892, rs372267226, rs372291543, rs372294022, rs372296755, rs372297653, rs372301194, rs372307080, rs372307729, rs372309888, rs372311060, rs372319526, rs372329788, rs372331506, rs372335249, rs372338015, rs372354284, rs372354460, rs372356437, rs372358704, rs372358924, rs372364695, rs372368003, rs372368614, rs372372742, rs372373220, rs372375707, rs372379309, rs372380157, rs372389941, rs372394805, rs374044647, rs374068132, rs374072573, rs374077664, rs374086055, rs374090280, rs374095410, rs374098417, rs374104512, rs374118201, rs374127279, rs374129273, rs374134281, rs374137507, rs374141901, rs374171358, rs374177282, rs374180202, rs374181251, rs374183918, rs374191157, rs374201203, rs374207670, rs374210667, rs374212583, rs374214620, rs374215323, rs374216676, rs374219229, rs374221459, rs374227526, rs374229546, rs372395156, rs372396435, rs372396687, rs372408184, rs372414339, rs372418676, rs372425108, rs372434025, rs372436522, rs372438056, rs372441167, rs372445188, rs372451776, rs372452543, rs372453272, rs372455130, rs372455406, rs372458670, rs372459771, rs372466666, rs372469111, rs372471048, rs372475409, rs372475805, rs372485534, rs372489296, rs372495118, rs372497468, rs372513382, rs372517608, rs372524143, rs372525144, rs372530465, rs372537998, rs372545271, rs372552876, rs372554927, rs372561300, rs372563712, rs372574661, rs372576669, rs372592018, rs372598165, rs372602933, rs372608101, rs372609081, rs372612467, rs372617930, rs372619234, rs372654432, rs372662128, rs372662331, rs372663922, rs372673218, rs372680864, rs372689042, rs372695084, rs372700729, rs372706983, rs370889787, rs370917347, rs370921616, rs370929001, rs370939726, rs370948959, rs370952290, rs370953983, rs370954736, rs370955461, rs370958251, rs370961321, rs370962501, rs370962953, rs370965146, rs370970155, rs370971186, rs370971334, rs370977366, rs370979438, rs370980854, rs370980876, rs370984871, rs370985792, rs370988409, rs370993081, rs370994607, rs371012260, rs371028651, rs371030527, rs371031138, rs371033875, rs371036244, rs371050234, rs371062178, rs371069427, rs371074706, rs371086034, rs371086409, rs371089456, rs371090397, rs371090419, rs371090527, rs371094072, rs371098409, rs371114097, rs371116656, rs371119049, rs371124832, rs371125941, rs371127758, rs371140013, rs371140157, rs371147404, rs371156074, rs371158456, rs371159589, rs371162111, rs371166825, rs371168562, rs371169303, rs371170206, rs371177432, rs371178457, rs371179811, rs371183241, rs371187239, rs371189544, rs371191809, rs371199963, rs371200359, rs372806024, rs372814981, rs372819657, rs372819751, rs372822822, rs372834205, rs372838964, rs372851510, rs372863373, rs372867867, rs372875305, rs372880073, rs372883571, rs372889390, rs372892105, rs372892427, rs372895033, rs372898589, rs372905420, rs372905834, rs372916842, rs372919126, rs372925305, rs372938168, rs372941677, rs372942049, rs372942283, rs372944123, rs372945220, rs372948536, rs372948703, rs372962551, rs372963547, rs372973625, rs372983792, rs372987540, rs372987684, rs372996805, rs373001190, rs373005444, rs373010536, rs373014576, rs373017625, rs373017804, rs373020095, rs373021065, rs373023736, rs373028987, rs373031476, rs373031923, rs373033392, rs373037571, rs373038250, rs373039736, rs373046089, rs373046693, rs373051367, rs373059821, rs373075000, rs373077637, rs373084151, rs373088650, rs373096236, rs373096641, rs373100233, rs373110652, rs373112351, rs373115426, rs373116759, rs373117080, rs373126366, rs373135033, rs373136722, rs373138176, rs373141140, rs373151976, rs373152450, rs373161390, rs373167655, rs373167820, rs373177128, rs373187155, rs373189798, rs373190922, rs373192860, rs373205121, rs373223795, rs373225122, rs373225314, rs373247088, rs373248314, rs373248822, rs373253372, rs373260638, rs373261967, rs373263669, rs373263675, rs373264706, rs373270680, rs373273574, rs373287968, rs373288777, rs373296438, rs373315263, rs373326517, rs373330674, rs373331759, rs373332016, rs373345180, rs373348333, rs373348991, rs373353207, rs373355605, rs373367560, rs373372091, rs373373855, rs373381731, rs373387077, rs373393097, rs373393207, rs373394581, rs373405993, rs373408702, rs373414235, rs373418054, rs373430143, rs373437604, rs373438928, rs373440775, rs373442526, rs373456378, rs373462137, rs373466982, rs373474815, rs373480249, rs373487908, rs373487945, rs373487973, rs373493931, rs373503481, rs373510833, rs373544922, rs373555975, rs373566226, rs373570261, rs373570586, rs373574952, rs373580954, rs373583396, rs373584045, rs373589232, rs373591042, rs373595461, rs373599490, rs373601214, rs373604680, rs373609820, rs373613965, rs373614496, rs373617100, rs373619430, rs373627609, rs373639635, rs373645680, rs373646121, rs373649989, rs373651341, rs373669640, rs373671083, rs373673505, rs373675125, rs373698929, rs373707295, rs373709668, rs373711924, rs373720310, rs373720311, rs373734240, rs373734348, rs373743625, rs373745243, rs373751419, rs373757863, rs373760524, rs373767226, rs373768787, rs373769002, rs373769379, rs373770721, rs373787590, rs373794608, rs373802594, rs373803912, rs373808581, rs373809679, rs373812802, rs373815034, rs373821784, rs373821801, rs373823080, rs373834277, rs373848275, rs373849134, rs373849411, rs373864541, rs373866593, rs373869159, rs373871770, rs373876782, rs373878744, rs373884267, rs373897110, rs373911402, rs373913165, rs373920483, rs373931414, rs373931488, rs373933781, rs373941041, rs373943308, rs373949180, rs373949307, rs373951037, rs373957163, rs373958023, rs373964615, rs373970771, rs373984485, rs373992160, rs373992169, rs373993253, rs373996361, rs373997222, rs374006928, rs374010037, rs374010333, rs374011239, rs374013130, rs374014316, rs374021915, rs374022452, rs374023169, rs374023970, rs374026597, rs374041247, rs372711167, rs372715292, rs372717465, rs372731091, rs372735783, rs372736458, rs372738217, rs372741650, rs372749615, rs372752094, rs372754709, rs372761123, rs372763139, rs372764531, rs372766755, rs372768775, rs372771874, rs372776428, rs372781385, rs372789002, rs372791555, rs372792777, rs372792815, rs372796391, rs374230421, rs374231476, rs374232270, rs374234238, rs374238916, rs374240570, rs374244576, rs374248889, rs374254908, rs374255893, rs374257704, rs374263079, rs374265727, rs374269856, rs374293332, rs374295633, rs374295634, rs374296174, rs374309961, rs374317984, rs374319713, rs374325790, rs374326788, rs374334980, rs374340927, rs374346055, rs374350564, rs374353607, rs374354497, rs374358624, rs374368174, rs374372446, rs374372826, rs374374064, rs374396955, rs374401219, rs374402831, rs374403765, rs374407742, rs374410032, rs374410668, rs374413818, rs374427538, rs374431654, rs374433049, rs374435068, rs374448875, rs374459440, rs374470107, rs374498625, rs374510027, rs374511684, rs374514454, rs374519301, rs374521057, rs374525889, rs374528413, rs374531775, rs374535138, rs374540879, rs374541256, rs374543931, rs374548947, rs374551339, rs374551364, rs374553376, rs374554180, rs374558334, rs374559373, rs374559442, rs374568220, rs374578261, rs374587087, rs374592296, rs374597337, rs374601290, rs374608238, rs374609780, rs374626848, rs374630633, rs374641764, rs374643020, rs374643808, rs374645107, rs374646222, rs374651164, rs374656305, rs374658003, rs374660634, rs374665378, rs374674478, rs374692035, rs374693355, rs374699004, rs374699910, rs374705334, rs374716749, rs374718542, rs374720321, rs374723702, rs374731666, rs374741132, rs374744335, rs374749601, rs374750539, rs374761796, rs374768440, rs374772708, rs374777113, rs374777884, rs374778196, rs374783856, rs374794064, rs374801453, rs374810552, rs374814263, rs374815503, rs374821844, rs374822767, rs374824600, rs374824990, rs374832972, rs374838243, rs374840611, rs374845609, rs374847532, rs374852167, rs374859264, rs374861782, rs374877554, rs374886338, rs374887852, rs374899319, rs374899648, rs374906191, rs374906955, rs374911172, rs374918566, rs374927296, rs374930676, rs374931665, rs374934554, rs374944161, rs374948797, rs374948856, rs374956938, rs374961831, rs374968377, rs374968980, rs374969727, rs374973810, rs374976843, rs374980327, rs374987834, rs374989434, rs374996325, rs375010954, rs375022086, rs375022832, rs375028819, rs375043898, rs375049018, rs375051351, rs375053078, rs375063830, rs375065115, rs375066460, rs375067008, rs375069390, rs375073097, rs375088386, rs375089140, rs375090155, rs375097053, rs375100782, rs375101210, rs375106182, rs375111588, rs375116028, rs375116238, rs375128127, rs375132835, rs375135557, rs375144772, rs375147734, rs375165174, rs375169011, rs375173971, rs375175138, rs375176540, rs375179785, rs375181981, rs375192374, rs375199087, rs375199322, rs375201946, rs375205481, rs375206066, rs375232037, rs375240974, rs375251857, rs375255954, rs375268655, rs375282825, rs375286423, rs375289887, rs375291329, rs375294039, rs375294434, rs375294765, rs375296495, rs375298690, rs375299456, rs375299975, rs375301325, rs375301621, rs375302554, rs375303427, rs375303610, rs375305081, rs375315746, rs375324853, rs375326320, rs375332254, rs375335665, rs375336123, rs375342984, rs375345710, rs375346697, rs375355123, rs375361386, rs375365504, rs375372520, rs375383220, rs375410908, rs375412074, rs375413336, rs375425966, rs375438392, rs375450184, rs375453146, rs375459476, rs375461962, rs375462739, rs375466969, rs375470170, rs375473634, rs375474916, rs375475778, rs375476169, rs375477383, rs375484173, rs375490917, rs375491544, rs375493459, rs375494653, rs375497458, rs375498062, rs375499255, rs375505044, rs375507168, rs375512421, rs375512959, rs375521376, rs375521916, rs375522681, rs375530150, rs375534362, rs375534790, rs375540032, rs375540538, rs375541495, rs375562373, rs375562611, rs375566701, rs375586301, rs375596878, rs375609253, rs375609280, rs375627772, rs375627898, rs375638381, rs375640462, rs375646406, rs375648880, rs375649338, rs375652107, rs375653706, rs375658768, rs375660150, rs375662771, rs375668462, rs375674469, rs375678522, rs375679016, rs375687271, rs375698506, rs375704491, rs375711247, rs375716936, rs375717498, rs375730438, rs375731148, rs375740493, rs375746405, rs375755056, rs375757067, rs375766814, rs375780563, rs375783928, rs375786383, rs375789131, rs375789967, rs375790557, rs375798031, rs375804085, rs375811534, rs375812503, rs375815641, rs375830399, rs375833758, rs375843933, rs375848956, rs375855882, rs375857934, rs375859281, rs375861034, rs375863734, rs375865914, rs375866761, rs375868465, rs375871280, rs375876080, rs375900837, rs375902524, rs375907558, rs375912641, rs375921764, rs375931944, rs375932294, rs375934720, rs375937307, rs375939170, rs375947888, rs375954087, rs375955996, rs375956899, rs375957056, rs375957245, rs375978713, rs375987674, rs375991887, rs375997130, rs375998699, rs376001971, rs376005811, rs376005844, rs376009672, rs376011865, rs376014152, rs376016417, rs376023971, rs376024539, rs376025652, rs376049761, rs376050307, rs376059202, rs376060146, rs376060378, rs376061535, rs376064737, rs376080677, rs376081535, rs376082547, rs376088608, rs376093987, rs376094238, rs376094961, rs376097319, rs376101996, rs376103484, rs376104011, rs376104128, rs376104852, rs376110992, rs376117832, rs376119531, rs376121319, rs376123709, rs376129973, rs376142751, rs376144897, rs376147154, rs376149354, rs376152967, rs376157107, rs376162512, rs376164871, rs376172340, rs376177317, rs376197057, rs376212093, rs376213046, rs376215408, rs376217217, rs376218083, rs376237067, rs376237214, rs376244739, rs376245071, rs376248151, rs376250508, rs376261645, rs376262275, rs376267734, rs376270716, rs376272426, rs376280240, rs376280677, rs376290207, rs376300943, rs376306602, rs376311435, rs376314577, rs376326182, rs376334948, rs376342562, rs376345863, rs376355283, rs376362826, rs376379654, rs376382580, rs376392807, rs376408017, rs376415737, rs376428165, rs376430565, rs376432257, rs376436076, rs376437110, rs376438772, rs376442081, rs376449109, rs376452979, rs376456919, rs376463467, rs376463573, rs376473961, rs376481077, rs376491577, rs376491633, rs376503715, rs376520031, rs376525441, rs376525945, rs376529091, rs376530812, rs376532356, rs376549449, rs376556325, rs376567975, rs376580266, rs376581868, rs376585927, rs376601070, rs376603498, rs376606277, rs376607386, rs376623157, rs376624050, rs376627347, rs376635090, rs376638717, rs376641798, rs376645295, rs376653718, rs376658270, rs376659162, rs376666274, rs376669518, rs376669639, rs376671532, rs376672625, rs376681837, rs376690783, rs376693904, rs376710404, rs376711222, rs376714361, rs376727105, rs376743842, rs376746354, rs376748080, rs376757561, rs376761824, rs376770409, rs376771572, rs376771742, rs376786010, rs376787486, rs376791608, rs376793095, rs376795474, rs376814034, rs376816452, rs376818186, rs376822855, rs376833216, rs376834780, rs376834947, rs376835407, rs376952845, rs376954709, rs376961995, rs376966328, rs376980925, rs376987165, rs376987439, rs376988998, rs376989128, rs376992500, rs376993241, rs376997446, rs377012590, rs377014250, rs377017816, rs377019006, rs377026034, rs377059340, rs377059348, rs377061615, rs377062931, rs377063665, rs377067769, rs377071392, rs377073390, rs377075216, rs377079310, rs377082411, rs377085253, rs377089476, rs377089986, rs377092963, rs376935390, rs376934082, rs376933732, rs376930190, rs376927173, rs376923052, rs376919804, rs376917587, rs376914088, rs376912095, rs376899544, rs376898582, rs376897100, rs376893786, rs376886784, rs376885067, rs376869342, rs376861620, rs376853123, rs376851340, rs376838559, rs376838449, rs377096360, rs377098988, rs377104205, rs377120717, rs377135214, rs377138418, rs377142211, rs377162084, rs377164820, rs377170260, rs377175642, rs377181916, rs377185794, rs377192243, rs377197457, rs377206858, rs377212575, rs377215873, rs377221126, rs377233757, rs377236888, rs377240134, rs377241688, rs377246361, rs377264091, rs377270072, rs377272631, rs377296050, rs377300474, rs377303174, rs377306891, rs377309094, rs377317446, rs377327179, rs377328186, rs377328406, rs377331910, rs377332274, rs377335450, rs377351540, rs377354657, rs377357041, rs377360047, rs377366332, rs377386831, rs377407423, rs377416312, rs377421332, rs377424053, rs377425754, rs377431577, rs377432724, rs377436182, rs377440882, rs377447678, rs377449912, rs377450504, rs377458615, rs377462517, rs377464550, rs377471075, rs377473351, rs377474926, rs377484470, rs377516353, rs377517001, rs377519984, rs377521060, rs377525806, rs377527635, rs377537029, rs377537252, rs377539567, rs377544169, rs377549921, rs377552567, rs377554081, rs377555936, rs377567594, rs377574158, rs377574411, rs377577345, rs377613542, rs377628678, rs377629358, rs377630412, rs377631442, rs377639914, rs377640556, rs377660750, rs377664674, rs377664730, rs377664986, rs377677046, rs377677517, rs377678090, rs377678712, rs377679162, rs377679186, rs377688056, rs377705521, rs377720317, rs377720495, rs377727349, rs377729390, rs377733724, rs377735800, rs377737049, rs377754298, rs377760727, rs377762951, rs386408573, rs386408574, rs386408576, rs386408577, rs386408578, rs386408579, rs386408580, rs386408581, rs386408582, rs386408583, rs386408585, rs386705742, rs386705744, rs386705752, rs386705754, rs397689480, rs397691182, rs397692383, rs397693426, rs397695702, rs397698094, rs397698967, rs397708056, rs397723510, rs397727285, rs397741889, rs397742656, rs397743204, rs397749896, rs397764314, rs397771545, rs397774114, rs397785590, rs397800156, rs397803704, rs397808537, rs397812165, rs397821306, rs397821873, rs397840041, rs397885193, rs397885502, rs397886744, rs397887202, rs397887285, rs397887416, rs397887824, rs397888513, rs397888713, rs397888811, rs397888816, rs397939861, rs397940227, rs397940766, rs397950727, rs397964871, rs397968151, rs397971533, rs397973383, rs397973635, rs397973820, rs398002812, rs398002813, rs398002814, rs398002815, rs398002817, rs398002818, rs398002819, rs398048846, rs398048847, rs398048848, rs398048849, rs398066262, rs398066264, rs398066265, rs398085299, rs398094573, rs398094575, rs398110658, rs398110659, rs398110660, rs398110661, rs398110662, rs398110663, rs398123366, rs398123367, rs398123368, rs398123369, rs398123370, rs398123371, rs398123372, rs398123373, rs398123374, rs398123375, rs398123376, rs398123377, rs398123378, rs398123379, rs398123380, rs398123381, rs398123382, rs398123383, rs398123384, rs398123385, rs398123386, rs398123387, rs398123388, rs527239333, rs527246500, rs527249860, rs527257101, rs527260975, rs527263254, rs527265920, rs527268996, rs527272701, rs527277542, rs527292904, rs527300478, rs527317167, rs527317910, rs527324334, rs527333662, rs527336878, rs527338226, rs527342003, rs527356471, rs527367607, rs527368262, rs527372773, rs527375274, rs527375902, rs527378191, rs527384943, rs527385814, rs527386552, rs527389269, rs527391315, rs527392631, rs527393477, rs527410947, rs527412635, rs527415764, rs527417720, rs527424568, rs527432741, rs527433028, rs527438770, rs527439993, rs527451051, rs527451110, rs527451808, rs527464740, rs527465313, rs527467426, rs527471388, rs527478890, rs527482759, rs527488631, rs527489483, rs527490707, rs527497477, rs527499253, rs527500205, rs527503342, rs527510636, rs527515878, rs527517791, rs527521111, rs527524925, rs527540492, rs527548290, rs527551814, rs527562594, rs527567990, rs527569245, rs527572187, rs527573287, rs527573890, rs527575261, rs527578116, rs527578542, rs527586210, rs527590756, rs527609070, rs527611765, rs527612525, rs527613839, rs527617547, rs527618132, rs527622244, rs527632151, rs527650931, rs527657876, rs527677061, rs527679340, rs527681637, rs527683408, rs527684079, rs527685209, rs527688470, rs527694358, rs527700503, rs527716263, rs527727227, rs527727355, rs527733892, rs527747685, rs527753509, rs527761231, rs527763635, rs527763955, rs527768336, rs527773121, rs527777257, rs527779880, rs527781537, rs527784122, rs527794926, rs527802547, rs527807661, rs527812889, rs527826566, rs527830222, rs527836970, rs527846083, rs527847531, rs527852758, rs527856692, rs527859430, rs527865162, rs527873776, rs527880952, rs527891933, rs527893893, rs527898822, rs527925299, rs527926262, rs527929381, rs527932421, rs527934931, rs527935487, rs527936234, rs527936525, rs527968930, rs527982002, rs527991824, rs527992615, rs527992787, rs527993291, rs527995217, rs527999363, rs528001210, rs528006656, rs528007402, rs528009026, rs528014509, rs528014912, rs528028810, rs528029733, rs528032736, rs528038761, rs528049219, rs528055064, rs528057499, rs528058584, rs528060106, rs528060707, rs528064949, rs528067671, rs528070767, rs528073732, rs528075450, rs528093524, rs528094711, rs528096634, rs528096811, rs528108565, rs528120232, rs528128991, rs528132422, rs528137315, rs528139813, rs528143501, rs528166631, rs528172495, rs528175678, rs528180269, rs528189735, rs528190166, rs528194499, rs528194716, rs528207268, rs528208131, rs528209876, rs528217573, rs528219366, rs528220577, rs528220990, rs528224354, rs528236690, rs528237505, rs528238994, rs528242884, rs528248245, rs528256207, rs528260650, rs528262838, rs528266185, rs528269722, rs528275188, rs528277448, rs528280267, rs528282286, rs528288902, rs528299914, rs528300015, rs528303137, rs528304730, rs528314461, rs528315056, rs528318136, rs528323870, rs528326177, rs528333135, rs528339804, rs528339895, rs528346683, rs528354474, rs528354790, rs528361656, rs528372798, rs528375869, rs528378018, rs528379078, rs528385715, rs528391901, rs528397881, rs528398171, rs528405231, rs528407253, rs528409113, rs528417707, rs528418922, rs528419150, rs528427786, rs528434111, rs528434252, rs528434466, rs528440693, rs528441235, rs528450101, rs528456838, rs528462540, rs528475951, rs528481244, rs528481517, rs528481579, rs528487098, rs528492282, rs528492954, rs528500403, rs528507506, rs528510328, rs528518866, rs528521249, rs528522912, rs528527862, rs528529808, rs528541750, rs528542067, rs528544591, rs528546591, rs528553739, rs528556005, rs528558131, rs528559153, rs528561599, rs528565152, rs528566748, rs528567882, rs528576497, rs528579347, rs528595879, rs528596209, rs528597303, rs528601324, rs528604318, rs528605821, rs528608705, rs528613073, rs528619000, rs528619598, rs528619610, rs528622614, rs528627998, rs528628315, rs528635227, rs528639976, rs528649454, rs528650977, rs528660858, rs528665016, rs528665458, rs528667314, rs528672844, rs528677503, rs528683876, rs528686368, rs528686776, rs528688196, rs528691381, rs528695713, rs528696708, rs528702844, rs528707902, rs528712358, rs528715098, rs528716655, rs528722388, rs528729616, rs528733368, rs528763840, rs528775992, rs528789970, rs528801847, rs528804077, rs528806515, rs528806584, rs528807551, rs528817861, rs528822150, rs528831744, rs528839870, rs528840227, rs528851449, rs528852769, rs528857862, rs528866709, rs528868417, rs528879214, rs528884580, rs528887422, rs528887922, rs528890409, rs528891193, rs528892647, rs528896159, rs528901895, rs528910433, rs528913913, rs528923598, rs528931629, rs528935500, rs528944054, rs528949850, rs528951212, rs528952897, rs528958934, rs528963228, rs528969421, rs528977304, rs528979917, rs528987325, rs528995084, rs529004592, rs529006971, rs529011044, rs529037165, rs529044270, rs529047415, rs529048457, rs529055249, rs529056155, rs529057176, rs529058324, rs529059482, rs529060223, rs529061972, rs529066723, rs529071028, rs529073008, rs529073264, rs529076645, rs529081950, rs529084482, rs529089845, rs529101709, rs529110314, rs529110531, rs529110881, rs529114747, rs529119378, rs529121524, rs529121542, rs529121931, rs529126557, rs529131168, rs529141964, rs529142469, rs529151354, rs529151513, rs529156759, rs529165806, rs529175639, rs529175882, rs529178903, rs529180668, rs529195178, rs529196999, rs529200365, rs529210077, rs529210135, rs529214185, rs529217732, rs529220269, rs529223620, rs529227211, rs529229645, rs529230998, rs529234658, rs529239667, rs529240145, rs529242758, rs529243138, rs529247757, rs529251470, rs529256397, rs529257215, rs529267785, rs529268301, rs529273388, rs529273777, rs529288810, rs529289766, rs529290392, rs529298545, rs529303565, rs529312554, rs529313423, rs529314532, rs529326177, rs529343313, rs529346741, rs529353456, rs529354980, rs529357466, rs529358278, rs529365497, rs529369507, rs529370503, rs529373188, rs529373501, rs529374706, rs529378392, rs529378925, rs529381089, rs529382176, rs529392156, rs529393656, rs529394869, rs529396064, rs529397349, rs529408880, rs529411699, rs529411961, rs529412293, rs529421231, rs529430311, rs529431596, rs529445416, rs529459498, rs529461099, rs529472899, rs529483008, rs529491245, rs529491916, rs529495194, rs529499600, rs529506854, rs529515984, rs529518264, rs529522995, rs529523318, rs529528670, rs529528761, rs529530761, rs529539303, rs529539477, rs529541998, rs529543683, rs529553569, rs529554738, rs529555082, rs529576994, rs529577647, rs529584360, rs529587964, rs529600047, rs529601477, rs529613188, rs529613236, rs529619447, rs529623651, rs529629601, rs529633965, rs529637580, rs529648915, rs529657743, rs529659232, rs529659484, rs529660217, rs529678415, rs529704985, rs529705657, rs529706900, rs529707843, rs529720060, rs529725669, rs529731714, rs529749872, rs529758558, rs529760082, rs529771643, rs529772889, rs529775366, rs529779809, rs529790276, rs529791750, rs529792881, rs529793189, rs529804321, rs529807881, rs529813481, rs529817952, rs529829745, rs529833233, rs529838447, rs529848608, rs529855873, rs529858379, rs529874983, rs529876593, rs529877481, rs529878249, rs529883733, rs529886168, rs529886207, rs529888443, rs529900424, rs529913234, rs529916625, rs529922531, rs529925701, rs529935051, rs529939416, rs529945679, rs529948764, rs529953148, rs529970225, rs529981007, rs529985302, rs529998259, rs530000567, rs530002523, rs530003161, rs530007317, rs530011118, rs530013561, rs530020301, rs530024714, rs530036770, rs530053247, rs530058517, rs530063270, rs530070157, rs530071676, rs530074674, rs530076648, rs530082619, rs530082635, rs530085706, rs530088940, rs530093860, rs530094887, rs530100380, rs530101102, rs530107932, rs530116879, rs530120746, rs530133951, rs530141916, rs530143114, rs530148782, rs530154152, rs530160587, rs530162930, rs530166226, rs530167499, rs530167711, rs530170955, rs530179438, rs530188568, rs530191206, rs530191548, rs530192238, rs530205700, rs530212277, rs530212611, rs530224232, rs530232921, rs530234789, rs530235706, rs530241223, rs530257588, rs530261080, rs530266399, rs530268157, rs530275161, rs530275406, rs530275757, rs530278851, rs530281570, rs530283817, rs530288177, rs530288620, rs530290783, rs530303373, rs530307779, rs530314316, rs530314520, rs530324335, rs530326449, rs530330164, rs530330207, rs530334934, rs530346173, rs530349363, rs530355912, rs530359125, rs530359234, rs530364753, rs530372616, rs530373207, rs530373758, rs530383191, rs530384166, rs530388366, rs530393863, rs530395730, rs530396486, rs530402827, rs530406247, rs530408355, rs530409990, rs530413833, rs530415061, rs530415547, rs530421114, rs530423896, rs530425831, rs530430071, rs530442137, rs530445904, rs530454615, rs530458204, rs530459712, rs530466329, rs530468405, rs530469305, rs530481419, rs530481523, rs530484648, rs530487676, rs530490859, rs530491640, rs530492956, rs530503673, rs530509902, rs530524391, rs530530183, rs530545829, rs530546663, rs530555499, rs530555755, rs530556047, rs530559598, rs530567217, rs530574104, rs530574889, rs530590321, rs530596252, rs530596686, rs530596823, rs530604067, rs530604123, rs530605508, rs530622378, rs530634224, rs530634672, rs530635231, rs530641853, rs530647657, rs530656789, rs530665739, rs530666947, rs530670335, rs530671111, rs530673427, rs530682661, rs530687986, rs530689471, rs530694228, rs530698702, rs530699155, rs530700391, rs530700593, rs530708886, rs530714171, rs530718450, rs530719168, rs530729415, rs530730035, rs530731149, rs530732450, rs530744228, rs530745768, rs530746474, rs530747650, rs530763820, rs530784320, rs530784718, rs530786733, rs530788965, rs530789383, rs530809010, rs530811119, rs530813163, rs530816692, rs530818754, rs530821041, rs530824975, rs530825233, rs530825454, rs530832456, rs530833314, rs530839609, rs530840453, rs530840586, rs530844803, rs530845884, rs530851943, rs530852598, rs530854848, rs530875621, rs530878477, rs530878483, rs530881081, rs530881126, rs530884076, rs530885907, rs530885956, rs530894789, rs530895429, rs530895706, rs530905450, rs530905876, rs530908631, rs530911936, rs530917137, rs530920997, rs530921563, rs530929849, rs530935477, rs530943462, rs530948474, rs530959559, rs530961482, rs530967829, rs530970097, rs530970921, rs530973645, rs530976292, rs530978159, rs530988751, rs530990396, rs530994047, rs530997388, rs531001049, rs531001141, rs531002522, rs531004267, rs531004753, rs531008741, rs531010341, rs531011183, rs531025284, rs531032409, rs531036183, rs531037536, rs531039329, rs531042007, rs531044845, rs531046812, rs531048358, rs531058337, rs531059076, rs531063242, rs531068704, rs531069812, rs531077470, rs531081776, rs531084093, rs531089417, rs531097149, rs531102206, rs531109090, rs531111148, rs531114871, rs531132946, rs531134525, rs531144109, rs531145114, rs531148833, rs531167602, rs531170554, rs531172874, rs531178938, rs531187065, rs531192063, rs531192694, rs531207717, rs531217683, rs531227108, rs531232154, rs531233687, rs531238827, rs531242264, rs531249016, rs531252972, rs531272184, rs531272809, rs531279719, rs531285632, rs531287710, rs531288986, rs531289321, rs531290743, rs531292351, rs531293538, rs531294888, rs531296884, rs531297245, rs531306248, rs531310820, rs531316606, rs531327760, rs531329179, rs531330216, rs531334536, rs531342803, rs531346563, rs531356218, rs531358604, rs531360327, rs531361598, rs531362716, rs531363057, rs531364536, rs531373016, rs531373023, rs531373305, rs531375682, rs531376204, rs531388546, rs531394760, rs531395696, rs531398745, rs531406806, rs531419547, rs531424109, rs531424175, rs531432262, rs531441884, rs531444803, rs531445479, rs531446293, rs531451014, rs531479410, rs531481161, rs531482478, rs531483448, rs531493698, rs531499198, rs531504630, rs531505249, rs531509742, rs531510183, rs531520897, rs531522661, rs531530402, rs531530869, rs531537716, rs531544232, rs531552830, rs531559155, rs531559275, rs531560434, rs531570160, rs531574005, rs531578371, rs531579010, rs531594374, rs531595491, rs531598679, rs531606886, rs531614813, rs531617755, rs531619633, rs531622069, rs531629381, rs531630674, rs531635744, rs531637252, rs531639239, rs531643393, rs531644187, rs531645338, rs531652814, rs531662238, rs531662592, rs531677637, rs531688721, rs531692174, rs531694985, rs531697334, rs531699318, rs531699751, rs531708029, rs531720087, rs531727734, rs531729066, rs531731597, rs531739731, rs531741498, rs531743214, rs531753421, rs531771581, rs531777007, rs531792265, rs531793348, rs531795032, rs531795901, rs531802997, rs531810826, rs531833064, rs531837273, rs531841028, rs531852224, rs531852923, rs531861223, rs531866853, rs531869515, rs531873010, rs531874798, rs531893151, rs531899754, rs531900035, rs531903476, rs531904638, rs531910233, rs531915509, rs531928310, rs531929277, rs531929313, rs531933801, rs531943614, rs531949005, rs531953009, rs531955460, rs531957466, rs531958805, rs531962295, rs531962925, rs531965650, rs531966550, rs531979888, rs531991840, rs532000090, rs532001146, rs532001943, rs532015139, rs532015694, rs532018221, rs532020235, rs532020665, rs532020982, rs532028129, rs532029356, rs532056313, rs532074703, rs532076940, rs532079050, rs532079417, rs532080062, rs532085258, rs532085682, rs532086342, rs532090041, rs532094231, rs532103985, rs532107646, rs532113869, rs532123691, rs532129910, rs532131002, rs532137608, rs532158924, rs532161886, rs532165998, rs532169853, rs532174385, rs532176174, rs532183904, rs532186000, rs532188197, rs532194404, rs532196410, rs532196416, rs532204211, rs532207142, rs532209754, rs532210472, rs532218302, rs532221786, rs532225783, rs532227517, rs532229483, rs532240101, rs532240790, rs532243449, rs532252413, rs532252424, rs532253107, rs532263699, rs532272179, rs532288493, rs532293181, rs532298051, rs532299538, rs532303836, rs532308001, rs532311025, rs532315082, rs532319652, rs532321143, rs532324994, rs532333338, rs532335456, rs532337161, rs532337751, rs532342842, rs532352425, rs532366951, rs532371720, rs532384852, rs532406519, rs532408414, rs532415708, rs532430243, rs532438468, rs532447571, rs532450127, rs532451952, rs532459451, rs532467627, rs532474559, rs532475456, rs532476786, rs532479083, rs532480080, rs532480449, rs532482220, rs532489798, rs532502966, rs532503865, rs532510921, rs532512857, rs532515802, rs532518456, rs532532424, rs532544626, rs532545380, rs532549033, rs532551960, rs532552593, rs532554136, rs532565574, rs532575888, rs532579645, rs532580922, rs532582612, rs532588521, rs532600244, rs532610494, rs532619046, rs532620092, rs532620879, rs532621750, rs532623744, rs532630952, rs532642761, rs532654225, rs532657170, rs532658382, rs532658431, rs532671409, rs532676307, rs532676479, rs532677542, rs532680808, rs532682970, rs532695905, rs532696541, rs532700708, rs532702852, rs532707301, rs532713517, rs532714208, rs532720201, rs532721256, rs532725386, rs532735491, rs532740929, rs532743220, rs532750858, rs532763483, rs532764369, rs532768579, rs532770252, rs532778428, rs532784731, rs532791313, rs532792837, rs532795717, rs532807979, rs532836603, rs532841632, rs532843789, rs532845503, rs532848624, rs532850377, rs532851918, rs532857764, rs532861350, rs532862724, rs532864781, rs532865161, rs532866197, rs532868626, rs532876459, rs532878225, rs532879789, rs532880720, rs532882784, rs532883247, rs532884473, rs532885189, rs532895900, rs532898343, rs532903852, rs532910429, rs532912315, rs532915828, rs532918991, rs532919062, rs532921318, rs532924983, rs532925003, rs532936091, rs532942883, rs532948219, rs532951083, rs532955911, rs532960467, rs532964344, rs532964732, rs532968717, rs532977404, rs532978181, rs532984547, rs532990631, rs533007468, rs533015861, rs533017338, rs533021071, rs533022841, rs533047906, rs533050354, rs533058337, rs533059472, rs533059853, rs533060223, rs533072254, rs533087990, rs533095702, rs533099321, rs533101432, rs533104474, rs533106848, rs533108515, rs533114895, rs533123202, rs533123925, rs533125559, rs533126069, rs533126852, rs533141863, rs533148212, rs533151316, rs533151632, rs533153850, rs533157002, rs533159313, rs533159432, rs533162220, rs533166474, rs533167367, rs533276797, rs533278657, rs533293457, rs533295858, rs533304426, rs533305581, rs533308677, rs533312505, rs533324392, rs533324968, rs533328677, rs533337222, rs533344970, rs533363837, rs533364096, rs533364660, rs533374105, rs533374588, rs533383249, rs533383353, rs533385437, rs533386657, rs533387826, rs533389885, rs533396833, rs533397195, rs533408585, rs533409637, rs533417039, rs533423123, rs533424875, rs533429232, rs533276400, rs533275069, rs533272798, rs533261112, rs533259616, rs533257650, rs533247411, rs533247002, rs533239185, rs533226517, rs533212459, rs533211140, rs533199565, rs533193542, rs533189851, rs533189203, rs533185701, rs533184717, rs533178676, rs533176102, rs533175313, rs533175129, rs533171522, rs533433085, rs533437374, rs533437790, rs533438330, rs533438610, rs533447565, rs533447658, rs533450269, rs533451475, rs533451987, rs533456716, rs533458060, rs533469390, rs533486650, rs533495733, rs533497499, rs533506775, rs533507559, rs533512865, rs533521396, rs533521860, rs533532782, rs533536717, rs533540739, rs533540756, rs533540935, rs533561825, rs533567270, rs533568729, rs533574786, rs533576310, rs533579502, rs533580269, rs533588970, rs533590183, rs533592184, rs533600683, rs533604446, rs533613394, rs533628672, rs533652939, rs533655401, rs533659770, rs533660253, rs533665394, rs533679294, rs533683107, rs533696161, rs533699610, rs533706334, rs533713462, rs533713931, rs533714832, rs533720641, rs533723221, rs533728037, rs533734246, rs533736054, rs533739412, rs533744829, rs533766587, rs533770096, rs533771579, rs533772546, rs533773682, rs533777721, rs533808735, rs533812398, rs533814889, rs533823332, rs533831695, rs533832853, rs533837557, rs533842874, rs533844136, rs533849228, rs533850915, rs533852376, rs533852792, rs533856584, rs533868718, rs533871262, rs533871616, rs533877479, rs533885839, rs533893713, rs533896124, rs533897137, rs533903533, rs533906567, rs533911286, rs533914772, rs533922443, rs533926001, rs533930666, rs533937103, rs533937668, rs533937899, rs533942827, rs533947707, rs533949412, rs533961435, rs533970826, rs533974556, rs533981181, rs533981305, rs533996309, rs533996942, rs533997752, rs533999461, rs534014651, rs534014884, rs534023337, rs534024082, rs534041954, rs534051057, rs534054613, rs534059880, rs534069814, rs534081016, rs534083417, rs534091986, rs534093719, rs534104011, rs534112377, rs534114115, rs534115249, rs534115915, rs534115982, rs534120906, rs534133319, rs534137612, rs534143322, rs534152856, rs534154592, rs534162627, rs534167212, rs534172540, rs534173468, rs534177645, rs534182299, rs534183139, rs534190716, rs534194465, rs534195010, rs534197017, rs534198704, rs534200255, rs534203728, rs534204770, rs534220160, rs534222830, rs534228654, rs534231903, rs534233732, rs534252362, rs534258680, rs534263793, rs534265442, rs534265688, rs534270462, rs534271124, rs534271476, rs534273848, rs534274495, rs534278362, rs534282112, rs534285669, rs534289082, rs534291421, rs534301002, rs534304480, rs534304804, rs534308006, rs534309549, rs534309880, rs534312194, rs534312800, rs534316371, rs534316738, rs534320775, rs534326533, rs534328322, rs534328810, rs534331189, rs534334232, rs534340265, rs534350219, rs534358351, rs534359163, rs534360794, rs534361655, rs534362242, rs534365150, rs534367887, rs534368948, rs534375914, rs534378890, rs534384605, rs534387672, rs534387823, rs534396385, rs534396728, rs534402577, rs534408564, rs534417572, rs534421566, rs534426373, rs534431319, rs534438434, rs534438824, rs534454019, rs534456491, rs534461664, rs534463184, rs534465380, rs534470847, rs534471045, rs534475275, rs534491595, rs534492410, rs534499443, rs534518004, rs534521154, rs534526950, rs534530202, rs534536549, rs534540049, rs534540326, rs534548805, rs534553124, rs534555904, rs534557378, rs534572625, rs534576771, rs534581338, rs534583607, rs534592329, rs534592405, rs534601661, rs534602273, rs534607959, rs534616508, rs534619144, rs534622633, rs534634524, rs534638781, rs534638863, rs534641546, rs534642137, rs534646512, rs534652237, rs534656948, rs534662795, rs534663674, rs534664628, rs534667879, rs534673210, rs534674278, rs534677668, rs534683577, rs534687572, rs534688953, rs534689336, rs534704941, rs534706076, rs534716998, rs534733968, rs534741737, rs534747401, rs534754918, rs534758464, rs534763632, rs534766651, rs534773530, rs534774616, rs534774709, rs534779894, rs534789394, rs534802936, rs534811699, rs534813733, rs534814525, rs534814563, rs534830193, rs534831697, rs534831820, rs534846412, rs534851713, rs534853403, rs534856604, rs534866681, rs534867012, rs534867870, rs534898384, rs534903124, rs534904371, rs534914829, rs534923709, rs534923757, rs534929200, rs534931376, rs534938641, rs534953333, rs534964604, rs534966734, rs534967077, rs534969839, rs534971369, rs534973294, rs534976096, rs534979012, rs535008169, rs535010116, rs535013739, rs535022442, rs535032096, rs535036939, rs535041773, rs535042441, rs535045165, rs535046414, rs535058478, rs535064865, rs535067182, rs535070474, rs535073688, rs535074653, rs535077136, rs535088497, rs535097622, rs535097725, rs535098001, rs535098800, rs535125467, rs535126805, rs535130554, rs535137843, rs535140295, rs535140386, rs535143003, rs535144547, rs535148331, rs535151116, rs535154568, rs535161782, rs535162503, rs535162663, rs535162861, rs535166932, rs535168567, rs535176930, rs535178710, rs535188496, rs535196685, rs535211333, rs535211381, rs535214792, rs535217561, rs535223830, rs535230681, rs535235233, rs535236876, rs535248203, rs535249452, rs535249563, rs535251410, rs535252150, rs535265221, rs535279146, rs535280647, rs535281324, rs535294079, rs535295239, rs535298461, rs535299113, rs535301634, rs535305138, rs535305381, rs535306866, rs535310349, rs535311569, rs535318059, rs535320814, rs535331337, rs535331537, rs535334576, rs535338953, rs535344033, rs535350099, rs535351317, rs535357573, rs535358371, rs535360980, rs535367651, rs535376114, rs535377255, rs535379252, rs535380492, rs535380856, rs535383458, rs535385966, rs535392800, rs535408481, rs535411130, rs535422562, rs535425376, rs535437224, rs535439482, rs535441296, rs535442465, rs535464097, rs535467675, rs535472205, rs535493898, rs535506135, rs535507080, rs535509092, rs535510827, rs535512610, rs535519064, rs535520811, rs535526394, rs535530367, rs535543621, rs535544405, rs535548116, rs535550443, rs535552886, rs535553882, rs535555128, rs535557343, rs535557533, rs535559911, rs535565667, rs535572539, rs535577847, rs535583335, rs535585257, rs535591718, rs535595209, rs535595560, rs535598875, rs535602579, rs535609050, rs535615666, rs535623384, rs535623585, rs535625214, rs535626088, rs535632842, rs535635043, rs535636435, rs535639257, rs535643049, rs535645257, rs535646807, rs535655435, rs535663778, rs535663873, rs535667068, rs535679091, rs535696763, rs535715323, rs535718824, rs535723371, rs535728755, rs535731955, rs535747465, rs535749630, rs535758449, rs535766441, rs535772662, rs535776465, rs535783846, rs535789434, rs535790884, rs535796331, rs535810372, rs535810380, rs535817251, rs535818949, rs535823530, rs535836836, rs535860495, rs535860975, rs535862395, rs535876089, rs535878598, rs535882724, rs535884059, rs535885387, rs535892781, rs535895281, rs535897800, rs535898952, rs535899284, rs535909211, rs535910156, rs535911659, rs535914231, rs535923083, rs535926078, rs535927978, rs535935136, rs535941543, rs535941550, rs535949380, rs535950412, rs535956306, rs535956973, rs535964659, rs535966888, rs535980765, rs535985194, rs535987768, rs536002902, rs536004258, rs536005125, rs536010305, rs536017592, rs536020781, rs536026230, rs536030803, rs536036722, rs536038698, rs536039880, rs536047185, rs536051609, rs536065349, rs536077288, rs536084557, rs536088051, rs536099026, rs536100409, rs536101135, rs536106931, rs536109826, rs536111699, rs536113184, rs536115234, rs536120548, rs536121289, rs536123562, rs536127699, rs536136634, rs536144222, rs536153845, rs536156802, rs536157519, rs536157540, rs536158070, rs536164519, rs536164905, rs536165342, rs536168156, rs536169604, rs536170256, rs536171486, rs536171826, rs536183613, rs536189424, rs536195620, rs536197645, rs536205222, rs536206950, rs536207724, rs536224201, rs536227135, rs536227191, rs536228274, rs536233783, rs536238938, rs536253426, rs536261542, rs536263171, rs536267119, rs536272130, rs536273676, rs536275863, rs536277086, rs536279291, rs536280097, rs536282490, rs536292261, rs536292974, rs536293958, rs536299936, rs536303705, rs536305452, rs536309974, rs536310543, rs536311373, rs536314395, rs536320915, rs536324419, rs536329694, rs536330823, rs536335337, rs536335480, rs536339179, rs536345371, rs536348144, rs536348621, rs536352280, rs536354108, rs536359243, rs536362824, rs536368310, rs536376798, rs536385684, rs536386810, rs536388954, rs536391653, rs536393998, rs536397519, rs536400724, rs536401121, rs536405655, rs536416101, rs536419259, rs536432786, rs536435627, rs536441342, rs536442025, rs536445489, rs536449125, rs536449281, rs536467296, rs536471177, rs536471393, rs536472083, rs536477323, rs536489859, rs536496864, rs536499315, rs536502720, rs536509216, rs536518109, rs536519009, rs536521398, rs536525443, rs536527490, rs536532701, rs536540932, rs536546007, rs536549425, rs536551525, rs536556698, rs536558739, rs536571749, rs536573359, rs536581089, rs536581803, rs536587330, rs536589174, rs536594271, rs536601778, rs536602435, rs536607983, rs536619090, rs536622069, rs536630072, rs536633560, rs536635342, rs536661105, rs536661184, rs536668315, rs536671317, rs536672750, rs536679536, rs536682488, rs536686143, rs536689048, rs536694177, rs536695433, rs536696246, rs536701568, rs536721877, rs536726673, rs536737402, rs536763271, rs536766906, rs536767365, rs536769421, rs536772461, rs536778003, rs536782212, rs536782506, rs536792843, rs536794065, rs536802355, rs536802724, rs536804659, rs536809511, rs536813779, rs536816754, rs536818208, rs536820183, rs536825211, rs536826483, rs536829419, rs536832439, rs536834969, rs536847945, rs536848080, rs536854667, rs536860302, rs536865097, rs536865190, rs536870806, rs536872678, rs536878773, rs536879163, rs536879219, rs536882398, rs536886418, rs536891378, rs536903262, rs536904580, rs536910185, rs536914229, rs536916009, rs536922289, rs536924633, rs536924738, rs536926783, rs536929466, rs536930148, rs536933075, rs536937402, rs536938538, rs536942644, rs536944467, rs536951410, rs536953721, rs536959509, rs536959977, rs536976486, rs536982215, rs536988451, rs536988663, rs536991295, rs536991931, rs536992585, rs536993976, rs537003923, rs537004988, rs537009903, rs537013356, rs537019649, rs537020741, rs537026027, rs537026662, rs537042085, rs537042938, rs537045768, rs537047119, rs537053687, rs537057375, rs537057533, rs537062210, rs537063221, rs537071963, rs537073757, rs537080272, rs537084583, rs537099468, rs537102187, rs537105626, rs537112632, rs537125329, rs537128347, rs537142114, rs537153651, rs537154249, rs537158067, rs537163784, rs537166989, rs537169368, rs537179636, rs537184069, rs537196949, rs537201394, rs537206797, rs537208986, rs537213397, rs537213911, rs537214780, rs537220313, rs537220917, rs537221824, rs537225050, rs537231927, rs537234976, rs537250357, rs537263605, rs537264549, rs537270940, rs537272277, rs537275468, rs537276465, rs537289573, rs537299276, rs537302403, rs537312494, rs537320796, rs537327965, rs537328324, rs537330783, rs537337330, rs537337788, rs537342472, rs537343550, rs537346018, rs537351244, rs537361106, rs537361800, rs537364639, rs537373759, rs537375144, rs537377540, rs537382377, rs537384873, rs537388547, rs537390321, rs537394261, rs537399851, rs537400187, rs537409405, rs537412549, rs537418439, rs537425564, rs537425885, rs537428323, rs537431891, rs537435416, rs537435999, rs537448880, rs537456240, rs537458283, rs537459117, rs537463175, rs537464101, rs537465521, rs537466776, rs537468006, rs537471143, rs537473884, rs537482091, rs537482154, rs537484294, rs537495611, rs537502420, rs537504298, rs537504933, rs537511520, rs537519927, rs537528704, rs537529234, rs537530732, rs537534583, rs537546580, rs537548698, rs537557212, rs537562622, rs537566018, rs537566035, rs537576210, rs537576396, rs537580755, rs537587415, rs537593474, rs537598364, rs537599897, rs537601616, rs537602514, rs537612774, rs537612921, rs537621164, rs537629433, rs537632904, rs537637088, rs537637580, rs537640207, rs537643343, rs537644987, rs537645492, rs537646947, rs537648882, rs537652990, rs537657632, rs537657673, rs537668928, rs537671787, rs537679779, rs537680966, rs537681783, rs537689359, rs537689486, rs537692998, rs537707062, rs537714425, rs537714842, rs537743222, rs537745294, rs537747452, rs537749821, rs537751216, rs537753063, rs537759338, rs537760971, rs537761475, rs537771254, rs537772989, rs537780496, rs537781839, rs537786447, rs537788569, rs537793871, rs537808333, rs537815075, rs537821156, rs537827610, rs537831534, rs537837196, rs537838056, rs537844569, rs537846961, rs537848650, rs537850651, rs537855386, rs537864517, rs537866413, rs537867516, rs537870138, rs537873319, rs537881127, rs537883636, rs537883648, rs537884108, rs537890616, rs537892662, rs537896966, rs537898149, rs537898424, rs537908419, rs537912157, rs537918797, rs537919305, rs537932913, rs537935812, rs537944341, rs537958082, rs537973613, rs537982580, rs537984308, rs537988347, rs537994472, rs537999657, rs538001556, rs538005766, rs538009867, rs538012097, rs538016067, rs538017390, rs538028869, rs538030632, rs538033142, rs538036946, rs538039355, rs538040949, rs538044159, rs538045624, rs538056368, rs538068528, rs538073619, rs538073873, rs538079618, rs538085184, rs538086562, rs538091929, rs538105056, rs538106384, rs538110644, rs538123187, rs538135912, rs538138108, rs538141613, rs538150507, rs538156563, rs538162581, rs538169177, rs538171811, rs538171830, rs538172316, rs538186013, rs538189206, rs538189709, rs538197582, rs538201750, rs538203484, rs538206056, rs538209756, rs538213305, rs538213957, rs538218986, rs538219142, rs538226336, rs538231087, rs538231557, rs538234828, rs538235822, rs538244360, rs538247791, rs538249215, rs538251698, rs538262558, rs538262720, rs538265153, rs538267529, rs538278047, rs538280647, rs538289674, rs538295154, rs538309436, rs538314608, rs538318868, rs538331916, rs538340373, rs538340561, rs538340857, rs538345771, rs538346390, rs538347693, rs538360495, rs538360733, rs538370788, rs538374881, rs538375714, rs538376355, rs538379146, rs538379165, rs538385251, rs538392909, rs538397299, rs538399676, rs538402330, rs538407946, rs538410746, rs538416169, rs538420421, rs538421472, rs538432008, rs538432123, rs538444931, rs538453299, rs538457952, rs538458745, rs538466736, rs538470713, rs538476409, rs538477675, rs538480309, rs538484262, rs538499534, rs538501501, rs538506225, rs538513958, rs538520379, rs538524555, rs538533483, rs538535755, rs538541178, rs538544842, rs538545783, rs538546406, rs538554133, rs538558038, rs538563679, rs538574048, rs538574581, rs538575863, rs538577246, rs538579630, rs538579639, rs538581249, rs538581327, rs538584995, rs538587087, rs538587440, rs538589718, rs538591673, rs538594865, rs538600277, rs538602108, rs538602717, rs538605616, rs538607295, rs538616032, rs538622728, rs538625271, rs538643824, rs538651869, rs538652839, rs538660309, rs538661746, rs538669382, rs538679670, rs538681289, rs538683200, rs538685166, rs538688236, rs538690863, rs538692549, rs538696723, rs538702491, rs538708669, rs538717561, rs538721137, rs538722973, rs538726919, rs538733765, rs538742068, rs538746002, rs538754994, rs538755389, rs538756871, rs538761657, rs538769895, rs538778375, rs538779834, rs538781880, rs538783633, rs538784440, rs540609757, rs540611163, rs540614187, rs540617276, rs540619647, rs540625590, rs540640577, rs540608934, rs540587915, rs540576988, rs540570301, rs540560286, rs540558432, rs540554685, rs540545327, rs540544502, rs540541360, rs540530939, rs540530925, rs540528618, rs540516307, rs540511613, rs540506274, rs540497358, rs540482373, rs540478988, rs540474150, rs540462938, rs540456248, rs540450498, rs540446693, rs540446450, rs540442230, rs540434545, rs540428364, rs540421822, rs540419198, rs540418825, rs540411680, rs540409790, rs540408507, rs540405797, rs540405183, rs540403045, rs540400078, rs540399494, rs540386440, rs540382754, rs540379502, rs540378656, rs540377599, rs540369295, rs540368930, rs540365054, rs540363912, rs540359463, rs540357279, rs540355833, rs540355318, rs540347072, rs540344103, rs540339161, rs540335385, rs540329774, rs540326963, rs540323711, rs540323702, rs540320664, rs540314242, rs540313237, rs540305570, rs540296386, rs540295746, rs540283556, rs540276167, rs540271137, rs540267228, rs540266570, rs540259727, rs540258298, rs540253453, rs540249981, rs540246863, rs540232575, rs540228300, rs540226668, rs540225817, rs540224463, rs540221202, rs540219280, rs540217804, rs540215221, rs540212285, rs540208966, rs540195988, rs540191177, rs540189873, rs540184717, rs540178883, rs540176780, rs540169669, rs540166820, rs540161550, rs540155835, rs540154365, rs540146011, rs540137048, rs540133150, rs540124799, rs540109552, rs540107581, rs540103926, rs540102787, rs540099587, rs540093857, rs540089936, rs540088493, rs540087714, rs540078865, rs540078566, rs540075772, rs540070692, rs540064356, rs540060641, rs540048969, rs540046423, rs540043979, rs540040425, rs540036846, rs540036653, rs540027369, rs540026500, rs539803266, rs539802306, rs539802231, rs539801127, rs539800570, rs539794266, rs539793433, rs539784364, rs538824801, rs538818769, rs538809768, rs538808244, rs538808039, rs538808023, rs538807090, rs538805240, rs538802503, rs538800872, rs538798738, rs538787936, rs540645050, rs540649901, rs540651734, rs540653355, rs540656211, rs540665505, rs540665624, rs540673521, rs540674455, rs540689167, rs540689696, rs540692416, rs540693982, rs540697204, rs540698233, rs540699118, rs540699519, rs540707776, rs540711927, rs540714965, rs540720916, rs540722125, rs540723791, rs540726364, rs540733414, rs540733424, rs540733583, rs540734859, rs540736114, rs540747787, rs540748646, rs540749021, rs540749627, rs540754195, rs540754521, rs540755551, rs540761582, rs540762760, rs540763263, rs540769910, rs540772259, rs540776327, rs540783556, rs540788004, rs540789035, rs540792076, rs540793237, rs540803538, rs540809476, rs540816529, rs540817189, rs540827382, rs540827974, rs540837865, rs540842118, rs540850772, rs540852368, rs540859479, rs540860484, rs540871815, rs540874579, rs540876081, rs540876858, rs540884693, rs540887093, rs540891631, rs540902588, rs540902630, rs540903409, rs540907825, rs540907929, rs540913481, rs540913869, rs540914685, rs540918698, rs540923371, rs540930867, rs540931372, rs540947050, rs540959149, rs540960045, rs540969284, rs540971286, rs540973100, rs540973258, rs540975420, rs540976310, rs540981804, rs540985618, rs540990815, rs540998476, rs541011104, rs541012135, rs541023249, rs541025737, rs541040889, rs541042860, rs541047874, rs541048006, rs541053378, rs541055033, rs541059557, rs541067324, rs541069145, rs541073485, rs540023658, rs540021908, rs540018011, rs540017038, rs540009717, rs540008486, rs540004195, rs540001170, rs539993935, rs539989168, rs539987331, rs539985653, rs539985239, rs539982699, rs539980692, rs539977979, rs539971177, rs539967077, rs539965253, rs539965122, rs539952246, rs539949917, rs539947789, rs539941804, rs539937603, rs539934828, rs539926974, rs539925563, rs539912182, rs539908522, rs539907474, rs539903075, rs539901594, rs539882298, rs539874841, rs539871261, rs539870723, rs539865544, rs539861857, rs539850021, rs539847800, rs539844137, rs539839186, rs539837940, rs539827647, rs539827573, rs539825059, rs539806635, rs539805553, rs539783557, rs539783063, rs539779668, rs539775365, rs539771999, rs539769627, rs539759065, rs539757200, rs539751436, rs539750795, rs539737807, rs539724225, rs539724174, rs539724067, rs539714324, rs539714282, rs539709234, rs539706802, rs539705289, rs539703476, rs539703290, rs539690812, rs539686301, rs539685234, rs539685056, rs539682254, rs539679177, rs539664426, rs539664387, rs539659676, rs539656393, rs539649430, rs539647826, rs539644538, rs539643875, rs539642797, rs539629338, rs539626698, rs539621488, rs539620049, rs539611147, rs539609510, rs539607149, rs539604713, rs542277104, rs542285628, rs542302300, rs542304945, rs542318090, rs542325313, rs542329243, rs542343572, rs542350520, rs542353031, rs542360789, rs542361433, rs539603797, rs539586530, rs539581843, rs539578677, rs539574019, rs539569890, rs539566603, rs539557285, rs539552660, rs539549496, rs539527614, rs539522292, rs539516427, rs539512799, rs539510387, rs539507157, rs539503888, rs539501090, rs539497854, rs539495962, rs539492904, rs539490564, rs539488340, rs539481918, rs539470448, rs539470409, rs539468591, rs539453247, rs539438380, rs539437565, rs539434014, rs539428570, rs539418219, rs539415815, rs539407222, rs539402896, rs539400155, rs539397501, rs539396086, rs539395617, rs539378863, rs539373968, rs539371912, rs539355721, rs539352717, rs539351711, rs539333006, rs539321303, rs539311463, rs539306514, rs539300946, rs539300516, rs539296362, rs539295347, rs539292364, rs539284673, rs539284373, rs539282468, rs539282024, rs539272560, rs539272245, rs539262770, rs539260644, rs539249184, rs539248888, rs539245885, rs539243342, rs539241025, rs539240339, rs539237686, rs539236695, rs539227870, rs539223359, rs539222445, rs539211650, rs539207510, rs539204570, rs539204166, rs539196513, rs539194517, rs539191203, rs539187236, rs539185579, rs539180489, rs539157807, rs539143365, rs539135613, rs539126558, rs539123638, rs539119223, rs539113778, rs539103605, rs539102200, rs539100233, rs539098609, rs539094249, rs539089456, rs539088768, rs539084446, rs539078237, rs539077863, rs539075882, rs539071440, rs539062953, rs539062185, rs539061079, rs539058328, rs539057261, rs539052391, rs539052350, rs539047367, rs539039645, rs539028802, rs539021930, rs539021806, rs539019143, rs539019118, rs539015833, rs539013740, rs539013566, rs539013463, rs539008542, rs539001132, rs538997012, rs538996977, rs538991787, rs538983837, rs538983383, rs538979223, rs538973302, rs538973222, rs538955816, rs538953371, rs538942678, rs538937564, rs538936392, rs538931742, rs538927588, rs538927203, rs538927090, rs538925944, rs538911506, rs538909841, rs538905129, rs538904047, rs538887945, rs538887570, rs538887047, rs538884975, rs538883434, rs538879534, rs538869850, rs538865373, rs538858668, rs538856831, rs538852564, rs538849718, rs538844842, rs538843444, rs538841500, rs538829807, rs541270166, rs543107835, rs541272185, rs541279123, rs541283159, rs541283653, rs541285191, rs541298221, rs541299599, rs541301170, rs541311270, rs541311908, rs541317825, rs541330027, rs541330991, rs541334095, rs541334857, rs541335533, rs541337571, rs541337759, rs541338346, rs541339605, rs541345547, rs541345793, rs541351958, rs541354659, rs541360047, rs541363155, rs541366129, rs541369214, rs541378525, rs541393862, rs541395258, rs541395547, rs541401768, rs541403016, rs541404397, rs541407232, rs541407945, rs541414864, rs541426010, rs541437554, rs541441127, rs541442071, rs541443532, rs541445181, rs541451929, rs541460918, rs541461231, rs541467863, rs541474528, rs541484286, rs541505360, rs541507526, rs541514814, rs541517984, rs541520255, rs541529792, rs541536529, rs541538383, rs541540836, rs541546147, rs541548535, rs541550119, rs541563698, rs541576651, rs541583755, rs541594103, rs541595648, rs541600195, rs541611001, rs541611482, rs541613094, rs541614019, rs541616282, rs541619475, rs541624625, rs541628153, rs541637281, rs541637959, rs541638723, rs541642500, rs541643370, rs541647884, rs541652592, rs541656776, rs541658710, rs541667489, rs541670788, rs541671165, rs541672846, rs541673711, rs541675165, rs541680805, rs541711145, rs541717959, rs541728407, rs541730502, rs541732857, rs541740473, rs541742270, rs541746015, rs541756427, rs541757158, rs541762502, rs541767550, rs541079663, rs541084813, rs541088204, rs541100653, rs541113783, rs541119242, rs541119923, rs541124844, rs541130687, rs541130835, rs541142332, rs541143509, rs541144570, rs541145489, rs541150853, rs541154405, rs541156953, rs541157113, rs541165110, rs541170695, rs541172671, rs541770533, rs541770675, rs541772096, rs541778191, rs541780624, rs541780780, rs541790550, rs541793553, rs541798573, rs541799834, rs541801455, rs541819601, rs541820464, rs541824184, rs541825607, rs541828024, rs541828974, rs541831558, rs541842235, rs541848862, rs541862130, rs541864066, rs541864725, rs541865041, rs541865650, rs541868642, rs541870827, rs541871965, rs541886579, rs541889799, rs541890838, rs541890865, rs541891745, rs541903755, rs541907675, rs541908018, rs541928056, rs541931918, rs541943095, rs541943349, rs541962147, rs541964886, rs541969793, rs541988773, rs541992211, rs541992339, rs541993018, rs542008408, rs542012374, rs541180011, rs541183571, rs541183641, rs541186192, rs541191513, rs541193030, rs541197877, rs541207058, rs542012637, rs542019360, rs542021233, rs542025045, rs542025247, rs542029942, rs542034282, rs542048823, rs542049700, rs542060923, rs542062284, rs542076661, rs542080438, rs542080630, rs542087767, rs542088027, rs544069685, rs544071594, rs544081928, rs544082395, rs544083142, rs544089203, rs544096982, rs542106732, rs542109311, rs542117828, rs542123746, rs542134074, rs542142689, rs542145329, rs542148021, rs542149910, rs542162220, rs542180140, rs542181858, rs542195526, rs542209535, rs542212841, rs542226546, rs542227981, rs542229855, rs542233883, rs542235233, rs542247126, rs542253978, rs542258193, rs542259331, rs542260641, rs542270626, rs542274234, rs542368619, rs542377003, rs542383864, rs542399960, rs542400210, rs542400723, rs542403460, rs542406458, rs542408959, rs542415579, rs542422186, rs542422557, rs542423653, rs542428452, rs542432460, rs542439836, rs542446245, rs542446331, rs542449522, rs542450623, rs542451891, rs542461624, rs542469651, rs542471163, rs542479627, rs542484231, rs542486978, rs542498391, rs542500047, rs542501961, rs542512967, rs542536680, rs542542447, rs542547459, rs542557518, rs542559777, rs542561798, rs542566573, rs542571565, rs542576549, rs542577769, rs542577976, rs542586101, rs542591027, rs542595741, rs542601524, rs542604334, rs542614187, rs542617442, rs542618995, rs542628922, rs542632759, rs542633001, rs542641337, rs542645266, rs542646836, rs542654321, rs542654889, rs542659526, rs542659686, rs542660436, rs542669776, rs542677619, rs542683623, rs544498581, rs544510221, rs544514232, rs544521844, rs544523831, rs544528876, rs544529126, rs544529766, rs544531164, rs544539655, rs544547260, rs544547835, rs544548832, rs544552032, rs544559201, rs544559204, rs544560411, rs544577459, rs544579766, rs544586023, rs544593116, rs544597908, rs544600898, rs544604304, rs544606828, rs544611265, rs544621270, rs544621291, rs544624002, rs544634620, rs544640571, rs544641503, rs542684186, rs542686550, rs542696457, rs542701378, rs542707919, rs542708327, rs542709732, rs542711542, rs542714107, rs542718046, rs542721686, rs542722269, rs542723377, rs542729297, rs542733326, rs542739117, rs542739633, rs542753408, rs542758416, rs542772015, rs542775894, rs542782414, rs542783943, rs542786965, rs542788940, rs542791769, rs542795123, rs542796527, rs542800482, rs542801837, rs542807569, rs542807927, rs542821046, rs542827433, rs542830084, rs542833807, rs542836289, rs542846493, rs542846712, rs542849928, rs542852618, rs542858891, rs542866715, rs542872169, rs542873960, rs542876954, rs542878237, rs542880823, rs542882118, rs542884165, rs542893673, rs542897236, rs542898610, rs542906448, rs542908207, rs542916497, rs542919271, rs542930062, rs542930569, rs542931960, rs542940994, rs542960149, rs542961489, rs542962325, rs542965311, rs542969885, rs542970729, rs542980143, rs542981258, rs542984309, rs542986174, rs542987259, rs542996183, rs542996553, rs542998514, rs542999704, rs543004895, rs543009315, rs543014436, rs543015609, rs543016609, rs543018191, rs543022129, rs541212262, rs541214992, rs541222761, rs541225187, rs541227934, rs541230062, rs541241989, rs541249201, rs541249556, rs541251975, rs541257989, rs541266266, rs543108591, rs543112126, rs543128415, rs543128536, rs543129291, rs543133159, rs543135594, rs543136000, rs543136709, rs543144153, rs543144801, rs543147426, rs543147683, rs543152098, rs543156623, rs543156963, rs543166929, rs543166985, rs543168971, rs543171919, rs543175875, rs543187404, rs543191229, rs543194903, rs543195628, rs543195673, rs543198674, rs543201362, rs543204411, rs543207784, rs543214697, rs543219485, rs543229291, rs543229712, rs543232466, rs543234568, rs543246159, rs543246288, rs543246847, rs543276127, rs543286526, rs543288858, rs543290644, rs543293656, rs543299340, rs543304321, rs543305057, rs543312034, rs543351142, rs543351816, rs543357691, rs543358521, rs543361038, rs543362471, rs543368627, rs543386696, rs543387927, rs543388101, rs543400643, rs543401296, rs543403656, rs543425033, rs543427504, rs543428393, rs543430387, rs543430823, rs543438395, rs543438824, rs543440297, rs543445373, rs543446685, rs543449750, rs543459897, rs543460891, rs543461834, rs543464455, rs543465485, rs543472700, rs543476133, rs543489694, rs543496570, rs543502222, rs543504268, rs543511214, rs543518464, rs543520813, rs543527603, rs543529178, rs543530668, rs543546331, rs543546400, rs543548201, rs543557694, rs543568912, rs543568962, rs543578909, rs543579788, rs543592477, rs543597048, rs543597667, rs543611166, rs543612606, rs543621006, rs543624117, rs543631779, rs543631923, rs543634924, rs543639852, rs543647401, rs543649127, rs543652416, rs543656741, rs543661695, rs543664187, rs543674558, rs543685962, rs543687206, rs543690119, rs543697646, rs543701286, rs543712040, rs543717125, rs543717538, rs543723319, rs543726722, rs543731060, rs543739044, rs543747391, rs543752311, rs543754365, rs543756398, rs543761144, rs543770099, rs543777042, rs543792205, rs543793825, rs543794382, rs543798057, rs543800896, rs543803082, rs543803305, rs543805770, rs543812551, rs543816872, rs543824838, rs543832089, rs543838726, rs543845444, rs543853675, rs543854549, rs543855100, rs543856157, rs543869643, rs543872389, rs543902456, rs543917647, rs543920050, rs543923869, rs543941784, rs543942970, rs543947642, rs543948544, rs543951303, rs543957796, rs543959889, rs543961402, rs543962373, rs543963519, rs543963950, rs543975700, rs543977467, rs543978455, rs543981470, rs543987764, rs543992094, rs543996496, rs543997397, rs544001450, rs544002348, rs544006258, rs544009665, rs544013084, rs544013579, rs544021329, rs544024280, rs544034538, rs544035539, rs544036692, rs544037298, rs544038151, rs544043313, rs544044955, rs544051155, rs544051964, rs544056914, rs544060805, rs544062825, rs544067253, rs544099841, rs544100315, rs544108396, rs544115996, rs544129137, rs544136717, rs544138567, rs544143792, rs544144069, rs544146513, rs544161747, rs544164363, rs544175225, rs544177457, rs544182566, rs544185582, rs544188908, rs544191532, rs544200684, rs544201472, rs544203558, rs544206750, rs544211140, rs544218152, rs544232955, rs544235846, rs544236493, rs544242925, rs544253690, rs544261066, rs544266725, rs544268227, rs544270493, rs544271722, rs544277269, rs544285788, rs544288881, rs544304809, rs544310496, rs544311097, rs544312027, rs544320986, rs544321115, rs544332445, rs544332800, rs544337721, rs544345223, rs544353241, rs544366299, rs544367235, rs544369241, rs544369894, rs544372034, rs544374616, rs544375182, rs544381165, rs544384190, rs544385021, rs544386659, rs544390901, rs544392042, rs544400416, rs544401380, rs544401872, rs544405332, rs544414496, rs544415317, rs544416345, rs544420757, rs544421281, rs544424229, rs544424409, rs544425463, rs544428146, rs544430590, rs544431444, rs544437366, rs544443870, rs544446067, rs544452206, rs544454784, rs544459545, rs544461962, rs544464111, rs544467396, rs544473682, rs544476992, rs544485994, rs544491355, rs544494265, rs544494984, rs543037505, rs543040030, rs543044153, rs543046945, rs543049200, rs543051752, rs543054517, rs543057560, rs543061122, rs543069967, rs543076991, rs543089812, rs543090398, rs543094010, rs543094067, rs544648595, rs544652576, rs544653452, rs544660719, rs544665093, rs544665717, rs544669695, rs544672753, rs544678243, rs544683212, rs544683513, rs544683716, rs544691169, rs544694404, rs544696321, rs544698662, rs544714674, rs544715405, rs544719377, rs544724092, rs544734170, rs544735382, rs544738152, rs544748927, rs544759076, rs544759343, rs544759743, rs544762826, rs544770595, rs544770630, rs544770652, rs544772179, rs544773614, rs544775804, rs544778748, rs544788642, rs544796506, rs544803054, rs544810578, rs544811457, rs544814017, rs544824717, rs544830032, rs544839033, rs544845026, rs544845144, rs544846600, rs544848933, rs544851456, rs544852656, rs544854085, rs544861417, rs544871588, rs544874710, rs544875699, rs544878251, rs544882021, rs544886053, rs544899633, rs544905031, rs544905109, rs544906370, rs544910648, rs544913581, rs544917884, rs544931026, rs544932641, rs544933328, rs544935423, rs544943728, rs544945434, rs544953079, rs544957274, rs544961594, rs544962805, rs544963587, rs544970213, rs544978924, rs544980077, rs544981370, rs544988860, rs544991924, rs544995101, rs544996569, rs544996824, rs545010818, rs545012751, rs545021248, rs545030178, rs545031190, rs545031686, rs545035554, rs545036023, rs545049279, rs545053927, rs545054992, rs545056000, rs545056394, rs545057727, rs545064678, rs545067068, rs545071228, rs545078466, rs545079125, rs545086158, rs545094317, rs545098818, rs545103604, rs545108975, rs545119074, rs545121666, rs545124185, rs545134054, rs545135040, rs545143977, rs545144063, rs545146774, rs545146794, rs545147016, rs545152340, rs545155717, rs545158393, rs545163649, rs545165002, rs545165970, rs545166701, rs545167715, rs545170631, rs545172706, rs545179553, rs545186322, rs545196756, rs545199894, rs545220190, rs545221272, rs545222395, rs545222862, rs545225253, rs545230993, rs545232363, rs545234985, rs545236916, rs545253189, rs545258660, rs545263405, rs545279306, rs545282186, rs545285712, rs545289125, rs545290010, rs545297338, rs545311473, rs545317749, rs545322729, rs545325636, rs545327056, rs545327497, rs545333768, rs545342426, rs545343008, rs545343848, rs545345714, rs545359295, rs545360269, rs545370947, rs545376303, rs545381316, rs545384952, rs545385631, rs545391524, rs545391920, rs545392600, rs545394702, rs545395695, rs545401282, rs545404899, rs545406083, rs545408894, rs545413162, rs545419110, rs545421289, rs545425723, rs545433995, rs545437348, rs545446121, rs545446748, rs545452282, rs545453167, rs545460613, rs545460940, rs545467458, rs545469702, rs545474657, rs545475357, rs545478159, rs545485956, rs545486575, rs545487931, rs545488006, rs545491377, rs545492008, rs545496667, rs545500928, rs545501463, rs545505937, rs545508576, rs545511757, rs545512964, rs545513531, rs545516127, rs545519662, rs545524951, rs545526155, rs545529962, rs545536359, rs545542414, rs545543244, rs545543998, rs545556024, rs545573354, rs545574511, rs545576463, rs545580370, rs545594120, rs545601077, rs545618840, rs545618980, rs545633190, rs545636045, rs545637848, rs545639602, rs545640989, rs545642536, rs545671449, rs545671958, rs545675442, rs545675998, rs545679500, rs545684087, rs545688055, rs545688513, rs545696156, rs545700667, rs545702329, rs545707246, rs545723599, rs545725970, rs545728894, rs545741071, rs545745834, rs545746342, rs545748477, rs545754884, rs545759743, rs545769193, rs545774370, rs545777707, rs545783414, rs545793214, rs545795187, rs545807292, rs545807771, rs545819263, rs545831403, rs545833000, rs545838406, rs545852805, rs545856955, rs545857902, rs545861620, rs545862543, rs545863435, rs545864722, rs545868235, rs545882182, rs545885315, rs545886339, rs545890232, rs545897392, rs545899293, rs545901055, rs545901868, rs545905893, rs545914513, rs545933688, rs545935589, rs545945744, rs545946035, rs545948715, rs545953546, rs545959960, rs545981372, rs545995906, rs546000835, rs546001998, rs546003264, rs546004158, rs546007590, rs546007637, rs546010527, rs546025115, rs546027681, rs546030306, rs546032526, rs546032929, rs546035704, rs546040123, rs546042950, rs546048875, rs546057480, rs546058112, rs546059560, rs546062689, rs546071401, rs546075124, rs546089803, rs546101401, rs546104266, rs546108454, rs546108532, rs546112497, rs546115893, rs546117849, rs546123527, rs546126309, rs546137841, rs546137960, rs546138763, rs546139165, rs546139488, rs546147666, rs546148179, rs546149826, rs546154725, rs546168055, rs546178057, rs546187818, rs546188598, rs546189530, rs546190259, rs546198162, rs546199211, rs546199991, rs546206883, rs546214200, rs546220137, rs546224061, rs546224715, rs546225612, rs546227659, rs546234149, rs546236570, rs546239510, rs546241804, rs546250860, rs546251267, rs546251329, rs546255563, rs546256264, rs546260093, rs546261825, rs546262553, rs546275048, rs546275209, rs546275784, rs546280867, rs546286078, rs546293323, rs546304649, rs546305055, rs546305336, rs546306209, rs546311961, rs546313149, rs546319110, rs546321916, rs546347032, rs546362996, rs546366551, rs546374516, rs546378131, rs546381872, rs546383541, rs546386270, rs546388068, rs546392584, rs546395293, rs546398158, rs546403097, rs546412319, rs546416409, rs546417161, rs546418681, rs546419768, rs546421299, rs546421983, rs546423002, rs546425345, rs546431332, rs546432323, rs546448474, rs546451572, rs546454500, rs546454960, rs546455777, rs546456588, rs546459138, rs546466281, rs546468828, rs546469238, rs546480952, rs546482863, rs546499408, rs546500496, rs546500574, rs546508251, rs546510211, rs546511380, rs546511439, rs546514554, rs546515316, rs546524010, rs546528860, rs546531714, rs546531834, rs546539938, rs546549056, rs546549865, rs546550631, rs546552378, rs546553789, rs546559298, rs546570548, rs546578313, rs546592726, rs546595921, rs546601290, rs546604531, rs546607231, rs546610424, rs546611059, rs546611684, rs546618000, rs546623737, rs546629472, rs546637372, rs546637914, rs546653399, rs546661708, rs546666148, rs546666396, rs546673028, rs546673771, rs546675448, rs546680101, rs546683379, rs546686315, rs546686689, rs546687247, rs546689202, rs546691420, rs546691511, rs546692194, rs546701747, rs546702715, rs546707053, rs546710247, rs546712266, rs546716317, rs546719410, rs546729583, rs546730081, rs546737420, rs546745186, rs546750290, rs546755622, rs546757700, rs546757765, rs546768733, rs546775884, rs546775958, rs546785141, rs546797440, rs546807262, rs546813762, rs546814916, rs546817306, rs546827303, rs546827923, rs546828810, rs546829312, rs546829517, rs546836712, rs546837587, rs546838198, rs546840727, rs546842735, rs546843325, rs546845535, rs546853395, rs546857554, rs546869757, rs546891996, rs546892852, rs546897381, rs546899272, rs546911324, rs546912914, rs546916399, rs546919962, rs546927051, rs546929407, rs546929872, rs546938358, rs546946477, rs546946828, rs546949445, rs546954230, rs546957679, rs546966959, rs546968285, rs546973745, rs546976479, rs546979283, rs546988105, rs546988493, rs546988621, rs546993067, rs546993509, rs546998913, rs547002365, rs547008214, rs547009897, rs547010506, rs547013509, rs547015394, rs547022320, rs547022417, rs547028221, rs547036675, rs547049167, rs547056948, rs547065694, rs547077011, rs547077508, rs547077591, rs547077891, rs547078055, rs547079291, rs547080642, rs547080656, rs547081099, rs547083193, rs547088425, rs547099285, rs547124028, rs547132891, rs547139641, rs547149866, rs547158356, rs547160392, rs547161637, rs547169724, rs547170554, rs547184458, rs547184915, rs547188898, rs547190195, rs547198058, rs547203574, rs547206495, rs547211003, rs547213197, rs547219458, rs547222500, rs547227758, rs547241182, rs547245983, rs547259167, rs547260447, rs547265058, rs547273865, rs547277459, rs547286848, rs547287678, rs547288769, rs547294491, rs547297662, rs547301836, rs547308392, rs547308677, rs547312858, rs547318353, rs547326321, rs547334615, rs547335883, rs547339063, rs547339211, rs547349377, rs547357768, rs547361521, rs547374760, rs547377676, rs547377958, rs547380131, rs547381303, rs547381869, rs547403056, rs547406157, rs547406733, rs547417730, rs547421462, rs547422381, rs547427524, rs547429495, rs547434132, rs547436545, rs547436576, rs547441321, rs547445543, rs547451930, rs547459409, rs547466259, rs547467698, rs547471288, rs547482092, rs547484145, rs547486083, rs547492390, rs547492566, rs547505556, rs547507661, rs547513150, rs547520807, rs547523432, rs547523481, rs547524715, rs547526071, rs547528380, rs547536267, rs547544264, rs547566281, rs547573752, rs547575095, rs547575799, rs547576750, rs547582328, rs547587078, rs547590883, rs547592432, rs547600681, rs547612129, rs547615498, rs547630762, rs547635617, rs547636525, rs547641211, rs547645330, rs547647701, rs547651880, rs547658779, rs547660582, rs547670564, rs547673923, rs547674802, rs547681185, rs547688888, rs547693315, rs547701433, rs547701684, rs547719158, rs547725607, rs547726179, rs547744256, rs547761199, rs547774465, rs547779818, rs547780852, rs547781802, rs547783454, rs547784407, rs547787481, rs547798327, rs547801328, rs547808663, rs547810222, rs547813330, rs547814177, rs547815720, rs547819999, rs547822007, rs547823165, rs547828715, rs547846815, rs547847956, rs547848042, rs547848734, rs547861302, rs547862329, rs547865731, rs547867444, rs547873831, rs547882651, rs547883031, rs547892270, rs547892844, rs547894439, rs547894597, rs547896219, rs547898875, rs547900411, rs547902829, rs547905587, rs547915396, rs547918573, rs547925547, rs547926056, rs547932904, rs547935373, rs547938238, rs547939229, rs547948894, rs547949707, rs547960254, rs547980348, rs547981398, rs547981971, rs547989082, rs547989409, rs547993389, rs548005058, rs548006816, rs548008283, rs548011113, rs548011519, rs548011641, rs548012755, rs548018402, rs548026690, rs548038694, rs548041379, rs548045778, rs548051750, rs548051847, rs548052089, rs548055235, rs548057125, rs548074100, rs548076761, rs548077146, rs548088879, rs548093024, rs548093140, rs548095849, rs548098343, rs548104497, rs548111144, rs548116158, rs548120273, rs548122587, rs548124081, rs548124562, rs548128729, rs548129722, rs548129885, rs548137171, rs548140599, rs548148572, rs548162334, rs548178747, rs548180676, rs548181148, rs548189516, rs548190297, rs548190334, rs548198028, rs548201498, rs548209243, rs548212118, rs548213476, rs548214609, rs548215309, rs548225783, rs548226888, rs548239590, rs548241533, rs548252683, rs548257668, rs548264013, rs548265936, rs548267612, rs548271813, rs548272670, rs548273628, rs548285848, rs548292441, rs548294128, rs548301537, rs548302238, rs548309094, rs548309389, rs548312432, rs548315639, rs548317933, rs548322329, rs548322570, rs548322830, rs548330333, rs548342673, rs548344163, rs548345297, rs548346835, rs548351200, rs548354746, rs548361681, rs548361869, rs548364474, rs548365459, rs548366624, rs548379498, rs548381450, rs548389926, rs548394028, rs548394087, rs548398452, rs548399235, rs548414313, rs548415995, rs548428526, rs548452094, rs548456957, rs548462556, rs548467798, rs548471958, rs548475666, rs548480032, rs548482084, rs548483084, rs548484136, rs548498764, rs548502407, rs548503313, rs548507905, rs548519375, rs548523594, rs548542019, rs548546963, rs548549787, rs548555260, rs548563469, rs548566927, rs548575317, rs548576419, rs548579813, rs548590711, rs548592077, rs548593342, rs548598498, rs548600498, rs548602839, rs548607382, rs548616865, rs548618065, rs548629978, rs548630192, rs548639008, rs548642861, rs548652444, rs548653894, rs548658395, rs548660937, rs548672729, rs548674203, rs548686028, rs548686649, rs548696355, rs548702129, rs548706000, rs548710702, rs548711025, rs548715831, rs548717865, rs548732360, rs548737695, rs548744018, rs548751157, rs548751815, rs548752995, rs548758946, rs548760458, rs548762928, rs548768611, rs548780116, rs548780905, rs548785209, rs548788935, rs548789042, rs548789456, rs548799847, rs548800025, rs548803516, rs548812294, rs548812429, rs548821025, rs548828085, rs548828130, rs548833555, rs548834123, rs548843129, rs548850762, rs548854040, rs548858673, rs548865417, rs548869927, rs548870269, rs548878281, rs548879635, rs548887053, rs548887117, rs548891660, rs548893637, rs548894782, rs548897626, rs548901480, rs548913168, rs548913971, rs548916029, rs548916204, rs548925880, rs548937508, rs548945682, rs548949768, rs548954260, rs548956978, rs548957478, rs548957849, rs548962602, rs548966560, rs548967557, rs548973891, rs548986553, rs549000239, rs549003033, rs549012715, rs549022766, rs549025243, rs549026760, rs549032532, rs549036718, rs549052322, rs549052571, rs549061886, rs549062441, rs549070954, rs549074482, rs549078059, rs549089821, rs549096533, rs549099265, rs549100575, rs549101313, rs549102120, rs549103945, rs549106930, rs549108626, rs549112903, rs549114137, rs549115818, rs549116248, rs549134842, rs549137772, rs549139171, rs549139178, rs549147199, rs549170142, rs549185775, rs549194338, rs549200298, rs549205949, rs549210626, rs549214552, rs549220003, rs549220385, rs549227397, rs549234298, rs549235173, rs549235419, rs549235772, rs549236856, rs549241102, rs549254421, rs549258007, rs549261677, rs549262559, rs549264731, rs549265024, rs549266013, rs549272426, rs549272510, rs549273708, rs549273848, rs549280946, rs549285389, rs549296206, rs549302707, rs549303722, rs549306137, rs549321638, rs549323139, rs549326063, rs549331029, rs549331409, rs549338178, rs549342465, rs549342984, rs549347915, rs549351377, rs549353575, rs549361138, rs549361182, rs549366551, rs549372468, rs549383160, rs549388846, rs549391117, rs549391745, rs549401139, rs549405648, rs549410497, rs549428840, rs549432354, rs549434272, rs549436980, rs549442712, rs549447386, rs549449607, rs549451771, rs549463295, rs549466124, rs549468389, rs549483371, rs549492247, rs549494238, rs549496089, rs549506482, rs549511131, rs549511951, rs549518607, rs549530162, rs549534304, rs549544726, rs549565771, rs549568524, rs549576799, rs549577371, rs549577965, rs549581327, rs549588614, rs549595264, rs549603317, rs549607338, rs549607986, rs549608211, rs549608447, rs549613528, rs549620933, rs549623384, rs549623560, rs549624841, rs549627039, rs549629190, rs549634438, rs549650356, rs549653787, rs549656598, rs549661158, rs549662696, rs549665008, rs549673736, rs549674573, rs549682524, rs549695514, rs549699038, rs549703223, rs549713534, rs549720651, rs549720851, rs549731022, rs549737710, rs549742441, rs549750609, rs549750722, rs549753160, rs549758195, rs549758758, rs549763959, rs549767469, rs549778573, rs549784743, rs549785612, rs549787425, rs549790591, rs549792523, rs549801670, rs549804911, rs549805678, rs549812760, rs549823748, rs549826171, rs549826842, rs549830913, rs549832294, rs549833284, rs549837361, rs549843918, rs549847517, rs549851377, rs549861292, rs549863476, rs549864049, rs549868768, rs549871346, rs549874369, rs549881117, rs549881533, rs549883657, rs549884947, rs549912498, rs549920301, rs549938637, rs549940911, rs549948591, rs549956055, rs549956987, rs549961836, rs549965398, rs549970403, rs549979537, rs549991744, rs549993071, rs549997760, rs550005816, rs550019314, rs550023897, rs550029155, rs550029519, rs550030991, rs550033158, rs550034051, rs550036317, rs550043070, rs550066918, rs550075362, rs550077885, rs550079304, rs550086726, rs550087512, rs550090966, rs550095200, rs550096141, rs550100750, rs550101411, rs550111369, rs550111587, rs550112911, rs550121586, rs550124874, rs550127755, rs550132149, rs550138885, rs550140146, rs550141806, rs550146795, rs550173903, rs550174507, rs550177081, rs550177217, rs550177350, rs550182885, rs550192556, rs550203019, rs550206280, rs550212000, rs550227442, rs550227741, rs550228944, rs550233648, rs550240691, rs550247463, rs550247819, rs550250162, rs550254612, rs550263360, rs550264587, rs550270433, rs550272058, rs550272351, rs550277514, rs550283514, rs550283820, rs550286174, rs550292912, rs550293400, rs550296514, rs550296543, rs550299788, rs550303625, rs550305465, rs550309179, rs550310974, rs550312280, rs550319538, rs550328370, rs550337299, rs550339749, rs550343370, rs550344179, rs550350451, rs550353087, rs550356260, rs550358464, rs550360461, rs550372760, rs550380351, rs550389800, rs550395111, rs550405817, rs550416988, rs550422991, rs550425861, rs550427572, rs550430316, rs550434037, rs550443347, rs550443467, rs550446348, rs550450843, rs550453810, rs550455869, rs550456668, rs550457828, rs550484431, rs550488535, rs550489297, rs550492114, rs550493943, rs550494590, rs550496338, rs550498690, rs550502537, rs550503227, rs550506130, rs550518598, rs550525871, rs550529609, rs550530547, rs550531103, rs550531472, rs550533224, rs550555299, rs550558672, rs550560348, rs550563112, rs550567427, rs550569442, rs550576286, rs550588757, rs550591351, rs550595142, rs550602640, rs550605092, rs550607175, rs550610153, rs550611399, rs550621550, rs550628929, rs550630902, rs550634018, rs550637606, rs550642650, rs550648228, rs550649082, rs550650791, rs550650922, rs550651766, rs550671365, rs550680336, rs550685232, rs550686701, rs550688009, rs550688684, rs550693587, rs550694640, rs550698015, rs550699945, rs550702385, rs550703132, rs550703218, rs550712988, rs550718124, rs550722207, rs550722776, rs550725333, rs550729932, rs550741292, rs550743383, rs550744855, rs550744936, rs550745225, rs550745980, rs550755584, rs550756454, rs550756528, rs550758668, rs550766417, rs550768897, rs550771912, rs550778263, rs550779649, rs550779679, rs550784974, rs550790878, rs550791678, rs550806373, rs550808649, rs550810870, rs550812892, rs550819390, rs550826764, rs550838558, rs550840043, rs550843468, rs550848218, rs550852301, rs550855023, rs550870690, rs550872928, rs550877355, rs550882590, rs550884510, rs550888947, rs550894895, rs550897816, rs550899365, rs550908338, rs550909457, rs550913952, rs550918765, rs550921450, rs550921727, rs550922093, rs550922126, rs550923963, rs550924771, rs550936966, rs550942459, rs550945416, rs550947974, rs550960035, rs550967676, rs550969349, rs550971298, rs550974336, rs550975712, rs550979669, rs550981272, rs550984426, rs550985187, rs550990871, rs550991169, rs550992748, rs550999762, rs551003020, rs551003269, rs551004870, rs551009521, rs551010099, rs551023906, rs551029619, rs551034090, rs551035926, rs551038983, rs551049708, rs551054264, rs551060360, rs551064190, rs551074068, rs551081801, rs551088576, rs551092443, rs551094592, rs551095810, rs551097411, rs551098021, rs551101962, rs551111728, rs551114449, rs551117901, rs551127119, rs551143618, rs551146574, rs551155548, rs551161320, rs551175988, rs551179589, rs551189824, rs551190476, rs551192178, rs551192190, rs551196665, rs551203128, rs551203339, rs551206685, rs551211723, rs551213891, rs551216628, rs551222019, rs551234298, rs551238518, rs551242777, rs551256564, rs551260183, rs551261328, rs551261974, rs551265244, rs551274114, rs551275751, rs551277045, rs551279311, rs551279803, rs551285200, rs551290968, rs551298940, rs551302569, rs551306478, rs551308153, rs551312645, rs551319015, rs551320514, rs551324521, rs551325919, rs551333110, rs551333625, rs551334060, rs551342678, rs551347994, rs551349642, rs551349680, rs551352488, rs551355705, rs551356829, rs551357525, rs551358977, rs551359342, rs551360469, rs551362587, rs551366079, rs551369175, rs551378428, rs551378974, rs551387315, rs551390204, rs551396441, rs551397482, rs551403160, rs551403540, rs551408833, rs551408915, rs551416966, rs551418410, rs551423389, rs551423570, rs551427422, rs551432240, rs551432287, rs551434953, rs551435298, rs551439836, rs551445314, rs551446436, rs551448653, rs551450834, rs551454046, rs551459202, rs551468468, rs551469015, rs551474082, rs551476582, rs551477101, rs551478448, rs551488023, rs551495089, rs551502854, rs551504451, rs551505884, rs551506088, rs551507511, rs551517013, rs551518684, rs551518703, rs551526620, rs551527465, rs551535422, rs551535971, rs551536174, rs551542000, rs551542081, rs551549141, rs551549936, rs551550818, rs551558187, rs551561754, rs551562583, rs551563322, rs551564001, rs551572799, rs551573510, rs551573859, rs551575193, rs551582016, rs551584997, rs551589443, rs551591244, rs551596837, rs551599574, rs551601095, rs551603128, rs551606997, rs551607996, rs551609229, rs551613571, rs551617945, rs551618894, rs551620922, rs551636060, rs551641724, rs551644156, rs551644855, rs551648378, rs551653806, rs551654165, rs551655368, rs551655474, rs551661959, rs551663476, rs551665715, rs551667498, rs551669763, rs551672995, rs551681257, rs551684739, rs551688050, rs551696963, rs551700735, rs551707333, rs551708998, rs551709603, rs551711740, rs551713371, rs551721115, rs551722248, rs551726165, rs551730704, rs551737378, rs551745897, rs551753676, rs551757675, rs551768840, rs551779006, rs551781880, rs551784866, rs551786220, rs551790294, rs551800780, rs551803429, rs551804895, rs551805608, rs551808514, rs551816322, rs551817676, rs551818222, rs551818709, rs551824726, rs551825353, rs551825535, rs551837598, rs551838757, rs551841586, rs551849743, rs551857994, rs551861428, rs551863880, rs551870011, rs551884025, rs551895780, rs551903509, rs551909601, rs551920532, rs551926028, rs551931143, rs551932168, rs551941301, rs551944670, rs551950329, rs551959414, rs551959882, rs551967912, rs551989000, rs551996090, rs552000335, rs552003944, rs552009478, rs552010535, rs552012484, rs552015061, rs552017818, rs552019250, rs552020856, rs552026528, rs552034186, rs552035737, rs552052629, rs552054815, rs552061143, rs552062405, rs552069381, rs552070081, rs552072782, rs552074415, rs552078709, rs552078956, rs552081937, rs552083120, rs552084771, rs552085714, rs552087690, rs552089558, rs552104194, rs552110853, rs552111462, rs552128520, rs552132264, rs552133733, rs552137420, rs552149725, rs552157724, rs552158153, rs552166334, rs552168764, rs552170686, rs552174584, rs552187625, rs552192310, rs552195471, rs552198928, rs552199793, rs552199917, rs552209517, rs552210348, rs552210896, rs552217458, rs552219343, rs552233010, rs552238297, rs552240034, rs552259264, rs552268094, rs552271758, rs552272784, rs552273521, rs552274506, rs552282978, rs552295855, rs552298299, rs552303231, rs552305849, rs552319780, rs552332197, rs552336148, rs552348071, rs552371113, rs552386171, rs552389379, rs552400188, rs552404732, rs552407323, rs552410380, rs552419898, rs552421797, rs552425828, rs552437972, rs552441908, rs552442477, rs552444077, rs552445485, rs552452912, rs552457371, rs552459732, rs552461103, rs552465918, rs552471724, rs552472368, rs552472611, rs552488335, rs552490372, rs552490400, rs552501944, rs552507571, rs552511882, rs552516739, rs552523805, rs552523981, rs552528914, rs552530857, rs552535741, rs552540391, rs552549495, rs552554429, rs552565647, rs552566023, rs552572713, rs552574189, rs552578104, rs552580910, rs552583556, rs552590629, rs552591905, rs552593085, rs552599189, rs552606388, rs552608586, rs552612863, rs552613048, rs552617584, rs552618957, rs552626795, rs552627800, rs552630448, rs552636457, rs552638237, rs552642006, rs552643013, rs552643412, rs552645723, rs552646961, rs552647167, rs552648915, rs552650249, rs552655580, rs552670423, rs552671102, rs552676215, rs552679671, rs552682203, rs552684006, rs552694273, rs552700329, rs552700960, rs552701148, rs552704083, rs552705309, rs552705559, rs552712632, rs552714425, rs552714865, rs552715427, rs552717230, rs552721724, rs552732558, rs552736374, rs552738118, rs552744080, rs552747712, rs552751515, rs552752681, rs552757415, rs552760422, rs552764747, rs552768645, rs552770237, rs552773292, rs552773343, rs552776880, rs552779047, rs552785512, rs552786445, rs552792305, rs552803185, rs552807806, rs552807878, rs552813135, rs552815877, rs552819271, rs552821413, rs552829092, rs552836822, rs552840620, rs552842910, rs552846590, rs552849979, rs552851055, rs552851721, rs552854051, rs552861805, rs552864974, rs552866440, rs552873339, rs552880472, rs552881302, rs552887189, rs552903673, rs552919954, rs552926473, rs552937971, rs552938955, rs552944480, rs552947488, rs552960856, rs552961025, rs552971273, rs552971561, rs552971772, rs552984238, rs552985950, rs552987466, rs552989439, rs552989582, rs552993752, rs552999036, rs553003491, rs553004183, rs553008626, rs553010217, rs553013389, rs553017829, rs553023011, rs553023321, rs553029031, rs553042486, rs553050783, rs553053672, rs553054776, rs553054810, rs553061571, rs553068544, rs553071574, rs553071885, rs553077129, rs553080541, rs553097531, rs553104605, rs553132323, rs553132691, rs553133748, rs553134969, rs553135327, rs553153113, rs553166055, rs553169652, rs553172338, rs553177114, rs553179683, rs553186418, rs553189308, rs553191208, rs553193356, rs553195391, rs553195948, rs553196379, rs553196922, rs553212205, rs553221833, rs553224277, rs553225269, rs553229229, rs553229344, rs553232359, rs553247680, rs553249253, rs553260965, rs553271782, rs553276488, rs553277105, rs553277731, rs553290473, rs553292883, rs553307820, rs553307843, rs553312134, rs553318994, rs553326498, rs553327461, rs553331400, rs553331815, rs553332405, rs553334530, rs553342589, rs553346167, rs553347835, rs553348539, rs553350940, rs553355106, rs553357025, rs553363219, rs553365826, rs553373067, rs553377792, rs553388805, rs553389327, rs553392249, rs553394680, rs553395069, rs553410664, rs553411685, rs553416623, rs553437114, rs553439033, rs553442879, rs553445649, rs553449556, rs553464572, rs553467105, rs553476523, rs553478510, rs553480106, rs553486401, rs553497221, rs553497826, rs553498223, rs553499736, rs553501123, rs553501389, rs553503181, rs553503928, rs553511036, rs553518581, rs553518939, rs553527982, rs553535617, rs553538327, rs553547639, rs553555223, rs553555338, rs553568151, rs553577772, rs553580380, rs553583871, rs553585746, rs553588325, rs553591951, rs553595402, rs553596705, rs553602983, rs553607575, rs553609897, rs553613156, rs553618164, rs553629491, rs553632311, rs553636084, rs553650327, rs553652059, rs553652872, rs553658617, rs553665338, rs553673615, rs553674559, rs553678179, rs553683706, rs553684026, rs553684743, rs553688391, rs553689786, rs553692348, rs553707894, rs553711868, rs553722489, rs553728811, rs553730862, rs553731480, rs553737171, rs553739037, rs553741403, rs553746620, rs553750217, rs553766861, rs553767736, rs553768626, rs553774706, rs553793500, rs553798219, rs553811508, rs553818739, rs553834891, rs553835225, rs553835481, rs553836506, rs553847714, rs553853005, rs553855466, rs553863249, rs553869036, rs553873794, rs553875992, rs553878267, rs553879800, rs553881385, rs553895213, rs553895915, rs553901205, rs553903468, rs553903694, rs553909503, rs553913427, rs553913601, rs553913928, rs553916804, rs553921399, rs553933387, rs553942754, rs553943504, rs553945358, rs553946469, rs553957557, rs553958255, rs553962824, rs553969177, rs553979426, rs553982022, rs553985186, rs553989180, rs553993135, rs553995317, rs553995640, rs553995756, rs553996987, rs553998440, rs554000866, rs554006664, rs554020088, rs554049162, rs554049417, rs554056835, rs554059779, rs554061865, rs554062975, rs554084558, rs554085936, rs554088700, rs554091586, rs554104861, rs554116490, rs554117785, rs554120584, rs554121373, rs554123221, rs554128334, rs554135828, rs554136067, rs554140779, rs554145607, rs554148772, rs554153505, rs554155878, rs554158754, rs554164018, rs554171174, rs554174716, rs554182233, rs554182565, rs554189339, rs554190322, rs554191297, rs554202806, rs554208988, rs554210191, rs554212495, rs554213176, rs554213683, rs554215631, rs554223416, rs554227027, rs554249012, rs554249603, rs554250615, rs554251917, rs554254492, rs554261139, rs554266065, rs554270978, rs554279184, rs554287408, rs554288847, rs554296071, rs554302213, rs554303854, rs554307341, rs554312750, rs554317773, rs554326776, rs554331583, rs554332154, rs554333718, rs554335028, rs554336710, rs554345139, rs554353414, rs554358372, rs554358399, rs554360850, rs554363188, rs554380238, rs554385961, rs554391285, rs554406244, rs554410751, rs554420429, rs554424940, rs554426433, rs554431126, rs554432214, rs554436060, rs554446060, rs554447562, rs554455079, rs554457593, rs554462196, rs554468179, rs554471590, rs554475705, rs554484555, rs554486098, rs554493153, rs554494999, rs554496456, rs554503108, rs554516716, rs554520737, rs554525597, rs554526724, rs554535066, rs554536698, rs554541352, rs554546202, rs554548959, rs554552365, rs554564341, rs554574800, rs554576854, rs554577667, rs554579760, rs554581677, rs554587270, rs554589617, rs554596114, rs554605601, rs554608581, rs554608667, rs554612934, rs554625308, rs554626361, rs554628703, rs554631623, rs554631858, rs554634309, rs554646099, rs554647170, rs554647595, rs554648877, rs554653083, rs554653185, rs554657026, rs554661778, rs554662127, rs554669190, rs554670279, rs554671085, rs554676808, rs554694510, rs554706628, rs554712121, rs554712575, rs554715102, rs554722529, rs554731103, rs554736808, rs554739106, rs554750769, rs554752201, rs554760977, rs554765482, rs554807567, rs554813380, rs554814312, rs554824104, rs554834382, rs554838443, rs554842349, rs554845471, rs554848049, rs554849765, rs554852219, rs554857011, rs554862374, rs554865946, rs554879185, rs554889298, rs554892027, rs554894365, rs554894851, rs554916445, rs554930446, rs554930788, rs554936292, rs554937942, rs554941209, rs555115800, rs555116717, rs555119111, rs555120799, rs555123656, rs555128907, rs555130838, rs555133328, rs555134034, rs555137962, rs555146418, rs555153365, rs555153934, rs555154170, rs556571092, rs556570885, rs556568636, rs556566156, rs556566155, rs556562395, rs556553451, rs556553410, rs556551279, rs556547769, rs556546859, rs556546846, rs556542218, rs556542176, rs556541711, rs556529397, rs556529270, rs556517786, rs556511859, rs556508604, rs556505011, rs556490096, rs556485418, rs556483811, rs556481168, rs556477419, rs556334156, rs556325045, rs556316704, rs556316569, rs556316529, rs556315335, rs556314254, rs556310424, rs556307036, rs556302450, rs556300625, rs556297364, rs556289231, rs556287056, rs556282113, rs556279166, rs556276391, rs556275849, rs556270167, rs556260547, rs556257959, rs556254969, rs556240900, rs556234829, rs556228885, rs556228721, rs556226090, rs556222703, rs556222445, rs556213954, rs556212568, rs556212043, rs556207950, rs556206848, rs556203142, rs556198164, rs556191174, rs556186857, rs556179045, rs556173532, rs556169927, rs556166361, rs556158288, rs556156536, rs556154214, rs556152226, rs556142498, rs556141018, rs556138330, rs556127609, rs556115446, rs556109667, rs556092200, rs556089846, rs556081322, rs556074949, rs556074320, rs556070702, rs556063910, rs556063672, rs556048718, rs556048174, rs556046871, rs556046242, rs556043575, rs556039827, rs556034856, rs556031468, rs556030960, rs556029547, rs556028061, rs556025503, rs556021694, rs556009760, rs556008425, rs556005936, rs556004673, rs555988456, rs555985401, rs555978640, rs555973693, rs555973426, rs555971097, rs555970031, rs555954083, rs555934030, rs555934026, rs555932760, rs555931357, rs555925424, rs555921520, rs555918050, rs555913114, rs555906521, rs555903961, rs557275659, rs557281276, rs557285007, rs557285284, rs557286127, rs557287633, rs557288731, rs557290197, rs557290700, rs555897395, rs555896139, rs555892003, rs555891324, rs555877933, rs555872595, rs555871048, rs555864240, rs555863702, rs555863099, rs555859781, rs555854488, rs555852666, rs555849512, rs555847829, rs555843708, rs555835670, rs555832476, rs555831005, rs555822865, rs555821332, rs555819382, rs555816709, rs555808628, rs555805022, rs555804693, rs555803475, rs555791709, rs555790456, rs555784934, rs555778656, rs555772095, rs555770779, rs555767281, rs555765629, rs555764479, rs555756578, rs555749965, rs555748803, rs555743561, rs555739971, rs555739248, rs555735933, rs555734198, rs555732497, rs555717065, rs555712755, rs555710753, rs555694640, rs555680301, rs555676141, rs555674276, rs555673025, rs555667625, rs555656452, rs555655415, rs555643869, rs555643573, rs555627527, rs555619334, rs555616510, rs555615249, rs555611703, rs555609944, rs555598511, rs555597964, rs555596258, rs555594958, rs555591398, rs555586851, rs555584948, rs555577609, rs555574485, rs555563547, rs555562889, rs555562860, rs555561709, rs555559873, rs555546598, rs555544404, rs555534954, rs555533654, rs555533137, rs555526051, rs555522904, rs555517778, rs555516258, rs555504571, rs555504307, rs555502029, rs555499490, rs555488742, rs555477903, rs555476675, rs555474261, rs555473057, rs555465894, rs555457271, rs555455708, rs555452944, rs555451488, rs555450421, rs555446761, rs555446319, rs555444494, rs555441291, rs555439684, rs555415349, rs555415085, rs555414285, rs555410618, rs555409649, rs555380287, rs555377928, rs555367752, rs555359240, rs555357629, rs555348653, rs555346999, rs555342647, rs555341548, rs555341429, rs555337782, rs555321522, rs555317246, rs555317227, rs555315202, rs555313991, rs555306301, rs555295652, rs555291568, rs555287474, rs555282948, rs555282280, rs555278988, rs555270352, rs555267517, rs555267181, rs555259886, rs555249810, rs555245017, rs555234640, rs555231123, rs555222433, rs555216916, rs555211090, rs555208015, rs555198457, rs555195729, rs555190264, rs555185285, rs555179496, rs555176172, rs555173904, rs555168340, rs555164260, rs555156319, rs555155229, rs555110263, rs555109381, rs555108826, rs555105751, rs555096952, rs555088987, rs555082391, rs555079734, rs555073609, rs555070795, rs555069490, rs555067160, rs555067054, rs555063886, rs555052779, rs555050597, rs555048846, rs555046074, rs555045755, rs555044445, rs555041853, rs555035256, rs555016323, rs555015069, rs555010938, rs555010299, rs555004938, rs555001831, rs554993382, rs554989026, rs554985166, rs554982272, rs554979850, rs554975784, rs554972694, rs554970267, rs554965037, rs554964483, rs554959805, rs554956654, rs554802149, rs554802060, rs554799795, rs554796945, rs554796861, rs554786465, rs554784786, rs554781555, rs554778589, rs554772961, rs554771126, rs556725524, rs556719797, rs556715832, rs556715768, rs556699863, rs556698946, rs556696299, rs556692463, rs556687132, rs556685954, rs556669699, rs556668482, rs556662683, rs556660849, rs556658140, rs556657889, rs556655415, rs556654623, rs556648635, rs556646756, rs556642234, rs556634530, rs556623111, rs556623105, rs556622194, rs556618340, rs556618074, rs556603028, rs556603003, rs556601507, rs556590068, rs556589596, rs556588649, rs556587910, rs556586276, rs556579260, rs556576001, rs556574797, rs556572186, rs556730516, rs556732340, rs556746095, rs556746620, rs556747149, rs556756705, rs556767303, rs556769488, rs556769890, rs556779267, rs556785757, rs556789912, rs556792776, rs556796110, rs556817633, rs556819071, rs556827319, rs556827701, rs556827969, rs556837340, rs556841130, rs556847382, rs556847724, rs556853404, rs556858238, rs556865116, rs556473870, rs556473246, rs556472693, rs556460846, rs556440555, rs556437644, rs556432303, rs556427797, rs556426974, rs556425496, rs556419663, rs556416009, rs556411910, rs556403437, rs556403086, rs556402502, rs556395931, rs556390462, rs556390332, rs556388455, rs556377897, rs556377820, rs556377670, rs556370218, rs556367686, rs556367388, rs556353598, rs556350204, rs556341569, rs556334546, rs556334470, rs556873179, rs556874970, rs556876354, rs556878499, rs556879088, rs556880008, rs556883445, rs556884354, rs556887180, rs556889755, rs558899312, rs558899732, rs558901411, rs558906112, rs556893469, rs556893780, rs556894091, rs556898837, rs556899937, rs556904680, rs556907370, rs556910449, rs556910628, rs556919726, rs556920764, rs556930929, rs556933087, rs556935873, rs556940235, rs556949869, rs556955214, rs556962389, rs556975984, rs556980248, rs556983722, rs556999956, rs558980956, rs558983956, rs558987504, rs558988220, rs558988460, rs558988991, rs558994377, rs558996568, rs559001496, rs559007051, rs559018649, rs557002560, rs557004319, rs557007498, rs557019218, rs557023062, rs557025238, rs557026255, rs557026511, rs557027746, rs557028114, rs557029562, rs557031959, rs557033763, rs557045399, rs557047607, rs557050759, rs557054433, rs557056163, rs557060930, rs557063063, rs557066590, rs557070672, rs557071765, rs557079645, rs557081273, rs557084166, rs557088784, rs557101158, rs557106337, rs557108615, rs557109395, rs557123014, rs557124472, rs557144231, rs557145350, rs557145415, rs557147693, rs557155036, rs557156155, rs557162190, rs557166630, rs557166684, rs557168210, rs557171822, rs557176839, rs557181796, rs557184099, rs557187095, rs557188690, rs557189059, rs557201024, rs557202283, rs557204312, rs557208807, rs557218484, rs557219434, rs557224509, rs557248447, rs557254385, rs557254857, rs557254908, rs557257073, rs557298828, rs557309483, rs557314653, rs557315068, rs557316027, rs557320242, rs557326394, rs557326519, rs557332149, rs557333348, rs557333713, rs557333972, rs557335167, rs557336840, rs557338421, rs557351115, rs557354068, rs557369423, rs557374820, rs557376122, rs557376442, rs557382253, rs557387668, rs557388246, rs557417649, rs557423671, rs557428179, rs557429658, rs557437427, rs557439417, rs557446929, rs559468757, rs559471865, rs559474134, rs557455071, rs557455515, rs557456058, rs557459228, rs557463091, rs557464346, rs557475975, rs557488020, rs557491781, rs557497951, rs557498093, rs557499273, rs557503526, rs557509825, rs557511843, rs557512479, rs557515483, rs557515919, rs557521852, rs557527334, rs557528901, rs557530181, rs557534091, rs557542680, rs557546692, rs557549063, rs557563306, rs557566954, rs557570426, rs557574679, rs557575482, rs557580897, rs557583319, rs557598886, rs557599155, rs557600155, rs557600669, rs557602689, rs557611762, rs557617035, rs557619242, rs557619492, rs557633294, rs557634413, rs557635345, rs557643264, rs557646494, rs557649636, rs557653892, rs557660626, rs557668160, rs557673431, rs557681899, rs557692881, rs557704757, rs557710857, rs557714619, rs557718180, rs557720127, rs557720905, rs557722778, rs557725196, rs557731395, rs557738551, rs557740205, rs557741388, rs557742490, rs557743875, rs557750463, rs557753418, rs557760585, rs557778568, rs557783655, rs557799178, rs557804524, rs557809046, rs557810636, rs557817830, rs557823155, rs557823856, rs557839169, rs557839588, rs557840824, rs557840949, rs557843393, rs557846066, rs557848882, rs557852930, rs557854113, rs557856944, rs557865473, rs557875427, rs557889493, rs557911386, rs557916031, rs557917154, rs557918164, rs557926836, rs557937075, rs557937207, rs557950522, rs557956732, rs557958483, rs557961938, rs557962503, rs557967579, rs557973277, rs557975537, rs557978876, rs557979193, rs557987674, rs557998938, rs557999317, rs558000073, rs558000514, rs558004028, rs558012051, rs558012763, rs558014272, rs558018507, rs558028074, rs558029996, rs558044112, rs558048784, rs558056771, rs558057996, rs558059304, rs558063545, rs558063569, rs558064508, rs558065948, rs558071022, rs558076796, rs558085316, rs558099840, rs558100650, rs558118146, rs558118525, rs558121979, rs558128793, rs558132395, rs558136476, rs558136514, rs558141854, rs558147048, rs558151227, rs558154554, rs558157184, rs558179187, rs558180573, rs558182737, rs558183911, rs558185454, rs558186873, rs558191434, rs558196479, rs558199516, rs558201700, rs558201891, rs558214574, rs558219359, rs558232100, rs558255156, rs558343950, rs558346281, rs560268226, rs558347603, rs558350493, rs558353673, rs558353976, rs558355168, rs558363530, rs558363829, rs558368767, rs558388371, rs558389662, rs558392498, rs558394207, rs558396479, rs558397496, rs558401513, rs558402422, rs558405421, rs558405870, rs558406746, rs558417876, rs558418054, rs558421351, rs558439818, rs558444408, rs558451562, rs558465317, rs558476579, rs558480631, rs558484081, rs558491509, rs558491656, rs558494850, rs558496644, rs558506489, rs558510226, rs558512468, rs558663495, rs558674061, rs558685006, rs558691229, rs558696081, rs558696779, rs558702152, rs558707865, rs558717540, rs558717626, rs558721660, rs558743531, rs558747926, rs558753896, rs558754787, rs558756959, rs558759941, rs558760122, rs558762877, rs558763842, rs558778021, rs558783050, rs558791405, rs560560483, rs560568288, rs560570065, rs560577652, rs558795309, rs558820740, rs558824202, rs558827249, rs558831766, rs558841215, rs558851524, rs558851901, rs558858027, rs558858782, rs558867388, rs558877302, rs558914915, rs558927998, rs558929053, rs558929361, rs558929660, rs558931637, rs558942936, rs558949754, rs558951064, rs558951562, rs558954763, rs558958783, rs558962730, rs558964886, rs558968415, rs558968508, rs558969737, rs558970854, rs558973823, rs558976042, rs558976833, rs558978466, rs559020144, rs559020816, rs559030800, rs559056902, rs559058082, rs559060884, rs559060989, rs559062931, rs559065653, rs559080073, rs559082131, rs559083777, rs559084993, rs559087304, rs559096638, rs559106753, rs559109211, rs559110376, rs559112018, rs559118571, rs559119787, rs559121688, rs559124173, rs559128457, rs559129105, rs559131545, rs559133487, rs559138773, rs559149457, rs559151487, rs559156903, rs559176036, rs559188387, rs559200484, rs559211349, rs559216719, rs559216980, rs560907063, rs560910801, rs560915290, rs560915741, rs560916425, rs560917802, rs560918363, rs560922577, rs560930785, rs560934220, rs560937454, rs559220215, rs559221653, rs559229280, rs559234400, rs559238748, rs559242875, rs559248002, rs559250356, rs559253011, rs559256099, rs559270490, rs559271639, rs559277098, rs559278195, rs559278336, rs559279424, rs559281667, rs559283429, rs559289784, rs559312257, rs559313995, rs559316538, rs559320054, rs559321614, rs559330870, rs559338927, rs559346022, rs559346846, rs559347121, rs559354402, rs559361782, rs559368800, rs559375987, rs559380348, rs559386786, rs559388066, rs559391607, rs559393690, rs559394289, rs559401613, rs559404851, rs559407947, rs559417389, rs559423720, rs559425976, rs559435588, rs559439267, rs559441215, rs559448919, rs559450463, rs559452487, rs559453268, rs559462953, rs559464647, rs559466179, rs559466333, rs559484719, rs559488119, rs559491651, rs559502936, rs559503358, rs559511670, rs559520106, rs559529900, rs559534139, rs559541007, rs559542162, rs559553099, rs559561706, rs559565021, rs559566501, rs559568348, rs559573682, rs559577193, rs559580771, rs559587779, rs559590091, rs559590382, rs559592294, rs559593967, rs559604585, rs559611812, rs559612381, rs559622118, rs559625777, rs559636575, rs559639823, rs559645713, rs559646259, rs559647739, rs559649707, rs559654248, rs559657552, rs559659823, rs559661830, rs559666061, rs559673588, rs559687872, rs559693943, rs559712927, rs559715681, rs559716365, rs559718316, rs559726509, rs559730117, rs559734823, rs559739672, rs559739960, rs559745124, rs559745161, rs559754083, rs559757794, rs559758058, rs559762307, rs559768030, rs559768173, rs559774094, rs559778026, rs559778571, rs559783600, rs559787010, rs559798981, rs559808079, rs559811601, rs559812247, rs559813357, rs559819471, rs559820234, rs559821621, rs559827604, rs559834633, rs559866158, rs559869741, rs559870127, rs559880450, rs559881290, rs559882914, rs559898803, rs559902310, rs559917901, rs559918194, rs559919582, rs559929226, rs559935751, rs559938105, rs559938252, rs559939445, rs559943587, rs559946934, rs559947211, rs559948265, rs559957047, rs559960008, rs559966554, rs559971396, rs559973120, rs559973769, rs559982317, rs559984020, rs561677401, rs561685767, rs561686234, rs561692267, rs561696601, rs561699897, rs559986209, rs559987923, rs559992670, rs559992739, rs559994086, rs559995694, rs559996285, rs559996559, rs560016944, rs560018650, rs560019127, rs560023390, rs560025183, rs560026048, rs560032509, rs560033228, rs560046601, rs560058696, rs560064897, rs560065318, rs560073305, rs560077552, rs560080441, rs560083155, rs560083220, rs560085172, rs560086990, rs560087039, rs560089773, rs560094899, rs560102677, rs560112564, rs560120382, rs560121359, rs560129164, rs560137128, rs560138902, rs560139751, rs560147472, rs560151851, rs560153059, rs558255671, rs558259779, rs558262576, rs558266760, rs558275657, rs558275886, rs558276135, rs558278145, rs558290516, rs558299009, rs558306711, rs558307709, rs558309112, rs558316004, rs558331579, rs558336216, rs560264880, rs561972956, rs561973777, rs561973924, rs560274164, rs560278454, rs560279112, rs560289158, rs560293221, rs560294582, rs560297712, rs560304858, rs560311488, rs560312477, rs560317260, rs560317339, rs560322799, rs560349151, rs560351451, rs560359374, rs560362859, rs560372258, rs560382175, rs560385455, rs560388180, rs558512666, rs558515205, rs558520652, rs558520685, rs558526679, rs558528147, rs558530421, rs558531306, rs558533400, rs558536266, rs558541557, rs558541744, rs558548809, rs558552724, rs558560757, rs558564247, rs558564881, rs558566651, rs558579639, rs558581275, rs558585755, rs558588010, rs558588583, rs558591363, rs558592224, rs558592263, rs558603952, rs558635413, rs558636424, rs558640755, rs558646131, rs558659711, rs560529550, rs560537017, rs560538656, rs560539584, rs560544992, rs560546980, rs560554205, rs560578649, rs560582876, rs560585177, rs560589242, rs560595989, rs560606011, rs560608417, rs560615504, rs560620982, rs560632465, rs560637467, rs560639662, rs560649240, rs560653879, rs560655522, rs560655616, rs560657866, rs560658022, rs560664942, rs560667319, rs560667366, rs560672340, rs560677724, rs560677750, rs560683038, rs560683085, rs560696657, rs560699494, rs560702030, rs560710501, rs560719354, rs560722384, rs560722635, rs560725531, rs560739827, rs560758517, rs560763716, rs560776665, rs560778401, rs560778925, rs560783533, rs560789531, rs560794324, rs560797159, rs560798107, rs560806142, rs560807246, rs560809927, rs560816226, rs560824212, rs560828937, rs560829676, rs560836684, rs560837479, rs560839747, rs560841755, rs560844500, rs560845483, rs560845616, rs560853316, rs560856513, rs560868313, rs560875411, rs560877448, rs560878444, rs560882228, rs560885766, rs560886247, rs560889801, rs560892939, rs560903012, rs560942116, rs560946481, rs560951268, rs560960615, rs560963153, rs560963914, rs560963970, rs560967521, rs560968179, rs560977008, rs560982709, rs560986645, rs560990338, rs560991710, rs560997876, rs560998245, rs560999145, rs561001135, rs561004725, rs561005390, rs561006642, rs561011335, rs561013202, rs561018326, rs562608087, rs562610576, rs562614069, rs562616636, rs562621874, rs562638334, rs562638837, rs562643638, rs562645018, rs562648729, rs561043251, rs561044450, rs561049370, rs561049588, rs561062256, rs561078150, rs561082430, rs561085585, rs561088995, rs561090948, rs561095444, rs561098320, rs561104185, rs561110615, rs561117282, rs561119275, rs561128126, rs561142207, rs561143208, rs561143448, rs561154237, rs561162269, rs561163058, rs561167263, rs561173286, rs561177709, rs561191236, rs561213437, rs561216501, rs561224040, rs561228578, rs561233220, rs561233621, rs561235273, rs561236773, rs561237907, rs561249888, rs561250133, rs561251992, rs561262307, rs561270306, rs561273757, rs561277491, rs561281497, rs561283135, rs561292987, rs561294018, rs561298134, rs561300052, rs561302301, rs561302615, rs561305634, rs561309244, rs561313949, rs561314376, rs561326137, rs561333169, rs561333860, rs561334427, rs561335206, rs561336173, rs561343120, rs561344660, rs561354157, rs561355538, rs561357409, rs561359493, rs561363128, rs561366124, rs561368512, rs561375959, rs561383556, rs561387731, rs561390470, rs561392841, rs561399089, rs561405208, rs561405685, rs561406428, rs561406726, rs561410701, rs561414616, rs561414931, rs561421989, rs561433799, rs561435982, rs561437009, rs561443391, rs561452385, rs561459752, rs561468389, rs561469724, rs561470711, rs561471335, rs561474427, rs561476451, rs561478676, rs561478885, rs561485721, rs561489235, rs561492555, rs561505229, rs561507285, rs561508576, rs561513658, rs561529393, rs561529490, rs561536283, rs561540341, rs561542162, rs561544623, rs561555662, rs561558018, rs561568407, rs561572916, rs561574133, rs561582172, rs561592957, rs561595050, rs561604027, rs561605827, rs561611116, rs561620876, rs561625786, rs561626257, rs561628097, rs561632282, rs561640723, rs561644969, rs561648411, rs561651447, rs561659670, rs561665478, rs561670632, rs561674456, rs561701082, rs561707092, rs561709582, rs561714998, rs561716577, rs561717694, rs561724729, rs561731645, rs561739334, rs561753797, rs561758502, rs561760825, rs561762030, rs561763221, rs561767336, rs561767886, rs561772157, rs561775023, rs561797390, rs561802437, rs561804220, rs561806737, rs561808207, rs561811782, rs561815329, rs561816139, rs561822322, rs561832245, rs561836785, rs561846960, rs561851189, rs561857167, rs561862838, rs561866319, rs561879947, rs561881027, rs561891813, rs561892084, rs561899038, rs561903563, rs560157914, rs560158694, rs560164716, rs560168558, rs560176061, rs560182420, rs560183075, rs560189681, rs560191910, rs560196735, rs560196879, rs560206895, rs560230728, rs560232169, rs560237029, rs560237227, rs560241345, rs560244416, rs560255396, rs560264196, rs561978533, rs563583774, rs563588303, rs563594456, rs563594467, rs561980099, rs561985105, rs561986909, rs561988939, rs561994158, rs562005502, rs562008110, rs562008501, rs562011981, rs562019748, rs562023442, rs562026558, rs562027551, rs562032571, rs562034578, rs562035130, rs562044556, rs562045190, rs562047628, rs562059282, rs562059681, rs560389323, rs560389988, rs560398883, rs560399442, rs560400737, rs560406210, rs560406753, rs560417218, rs560418248, rs560421138, rs560430234, rs560433067, rs560436056, rs560444052, rs560445587, rs560445624, rs562068267, rs562079823, rs562082073, rs562083611, rs562092909, rs562106425, rs562108535, rs562109369, rs562114704, rs562116329, rs562122311, rs562133010, rs562133307, rs562139397, rs562140545, rs562147417, rs562155018, rs562155570, rs562158339, rs562161594, rs562167192, rs562172579, rs560450145, rs560469322, rs560469499, rs560470480, rs560471312, rs560471617, rs560477481, rs560489827, rs560496186, rs560499388, rs560504540, rs560513536, rs560516529, rs560518269, rs560528201, rs562432655, rs562434832, rs562435685, rs562445552, rs562453494, rs562453717, rs562454478, rs562455753, rs562457227, rs562460152, rs562463153, rs562466150, rs562466848, rs562475356, rs562477930, rs562478688, rs562487449, rs562494228, rs562495942, rs562508296, rs562514753, rs562517855, rs562520683, rs562524620, rs562524634, rs562525697, rs562526320, rs562527051, rs562527210, rs562531312, rs562535369, rs562536296, rs562546168, rs562546946, rs562550498, rs562554864, rs562555635, rs562555801, rs562556870, rs562559594, rs562561654, rs562563683, rs562568077, rs562572875, rs562572890, rs562580502, rs562580712, rs562582482, rs562587537, rs562588545, rs562593567, rs562595298, rs562599366, rs562607863, rs562653057, rs562656178, rs562658979, rs562660086, rs562663524, rs562664129, rs562667657, rs562675116, rs562675404, rs562676671, rs562682373, rs562686338, rs562688086, rs562695703, rs562706310, rs562706324, rs562708164, rs562714410, rs562715807, rs562716308, rs562717047, rs562723120, rs562724575, rs562726908, rs562735062, rs562736502, rs562743354, rs562743752, rs562761371, rs562761631, rs562767496, rs562773677, rs562787448, rs562799430, rs562806207, rs562812796, rs562813486, rs562817121, rs562831835, rs562838571, rs562839222, rs562844369, rs562846878, rs562852738, rs562861750, rs562868940, rs562878988, rs562879376, rs562881344, rs562887595, rs562890997, rs562892022, rs562896941, rs562899046, rs562914153, rs562916930, rs562918610, rs562919676, rs562922594, rs562924101, rs562925207, rs562929391, rs562934123, rs562938570, rs562939399, rs562952157, rs562953502, rs562955472, rs562957142, rs562957399, rs562958990, rs562972723, rs562973637, rs562984820, rs562986519, rs562987896, rs562991344, rs562994527, rs563005053, rs563005724, rs563017411, rs563020771, rs563026331, rs563030471, rs563031412, rs563038604, rs563040589, rs563043109, rs563052549, rs563052962, rs563057820, rs563060238, rs563063751, rs563065832, rs563067702, rs563071965, rs563083205, rs563085681, rs563097405, rs563101592, rs563102689, rs563103809, rs563104876, rs563112789, rs563117754, rs563129293, rs563130170, rs563132174, rs563132249, rs563134970, rs563138648, rs563142623, rs563147145, rs563148057, rs563151231, rs563151637, rs563153127, rs563157831, rs563165504, rs563172561, rs563175971, rs563186291, rs563198123, rs563201416, rs563202221, rs563204366, rs563215317, rs563222855, rs563227788, rs563232757, rs563233545, rs563233939, rs563246555, rs563247952, rs563253644, rs563266023, rs563269577, rs563271027, rs563281537, rs563286270, rs563296095, rs563322559, rs563333300, rs563334789, rs563338485, rs563351058, rs563356002, rs563367693, rs563369686, rs563370766, rs563370944, rs563379031, rs563379480, rs563384136, rs563386223, rs563387318, rs563388783, rs563390817, rs563393657, rs563396202, rs563408204, rs563414950, rs563415778, rs563417428, rs563419341, rs563422327, rs563423150, rs563428235, rs563441472, rs563443390, rs563445575, rs563447157, rs561905527, rs561907444, rs561915241, rs561917128, rs561927090, rs561935581, rs561938330, rs561944490, rs561944715, rs561945887, rs561950953, rs561954703, rs561956523, rs561964698, rs561967394, rs561968089, rs561968856, rs561972803, rs563602475, rs565233600, rs565235282, rs565242299, rs563603454, rs563623694, rs563625045, rs563629606, rs563631788, rs563636046, rs563638257, rs563638833, rs563641931, rs563651484, rs563659109, rs563661766, rs563683651, rs563684854, rs563685276, rs563695906, rs563705088, rs563710447, rs563711466, rs563711873, rs563718564, rs563719843, rs563732331, rs563736828, rs563740987, rs563741201, rs563745692, rs563746985, rs563749236, rs563749300, rs563750685, rs563753563, rs562173585, rs562177139, rs562179119, rs562179930, rs562180335, rs562183937, rs562187210, rs562190962, rs562201892, rs562202951, rs562208347, rs562210135, rs562218930, rs562230939, rs562240885, rs562242362, rs562246108, rs562251983, rs562257612, rs562280462, rs562284352, rs562286394, rs562295519, rs562298015, rs562301618, rs562302001, rs562308584, rs562308950, rs562317637, rs562319137, rs562321155, rs562322541, rs562322882, rs562329254, rs562331056, rs562336851, rs562345997, rs562348069, rs562353851, rs562353981, rs562363762, rs562363839, rs562364807, rs562370361, rs562374802, rs562374815, rs562381900, rs562389664, rs562389673, rs562394082, rs562400381, rs562405391, rs562405641, rs562408358, rs562414992, rs562426099, rs562429190, rs564255139, rs564258033, rs564259142, rs564262724, rs564265732, rs564306263, rs564322937, rs564326265, rs564329899, rs564333177, rs564340784, rs564358679, rs564359688, rs564360580, rs564366790, rs564372621, rs564375687, rs564377074, rs564383009, rs564388991, rs564394950, rs564399054, rs563448773, rs563453483, rs563469048, rs563479868, rs563489751, rs563490057, rs563490360, rs563497334, rs563497413, rs563500753, rs563500899, rs563501985, rs563507051, rs563517731, rs563526572, rs563529251, rs563529726, rs563538056, rs563539716, rs563545052, rs563546224, rs563557090, rs563561226, rs563570222, rs565247203, rs565845896, rs565856289, rs565859948, rs565866264, rs565869763, rs565890844, rs565892286, rs565893210, rs565904442, rs565909854, rs565912261, rs565917756, rs565920305, rs565247835, rs565251256, rs565253355, rs565267713, rs565271969, rs565273061, rs565280107, rs565280643, rs565289743, rs565289993, rs565290869, rs565304266, rs565308677, rs565314064, rs565316367, rs565317539, rs565319054, rs565321770, rs565323981, rs565331008, rs565334693, rs565335122, rs565335741, rs565338208, rs565349228, rs565358696, rs565358733, rs565363628, rs565367365, rs565375135, rs565383184, rs565388858, rs563756620, rs563764236, rs563766559, rs563768247, rs563771637, rs563778138, rs563779168, rs563782160, rs566107229, rs566116004, rs566117415, rs566118861, rs566120503, rs566130083, rs566141362, rs566146528, rs566151756, rs563789660, rs563793872, rs563795877, rs563798026, rs563801115, rs563805385, rs563805824, rs563807924, rs563808336, rs563816423, rs563817012, rs563821391, rs563826313, rs563829353, rs563830166, rs563830492, rs563840504, rs563852544, rs563857273, rs565391198, rs565393045, rs565395751, rs565398553, rs565405405, rs565406065, rs565429072, rs565430149, rs565430923, rs565434615, rs563858676, rs563862265, rs563867830, rs563868472, rs563868624, rs566281460, rs566282765, rs566284507, rs566290280, rs566300611, rs566301730, rs566302197, rs566307986, rs566309675, rs566313291, rs563882035, rs563882884, rs563887112, rs563890864, rs563897508, rs563898528, rs563904698, rs563905615, rs563924944, rs563926124, rs565449602, rs565453421, rs565454937, rs565460491, rs565462975, rs565474090, rs565474512, rs565474618, rs565478844, rs565483630, rs565487089, rs565487427, rs565494261, rs565503462, rs565508931, rs565511732, rs565516166, rs565527306, rs565537823, rs565544546, rs565551680, rs565554875, rs565556037, rs565557186, rs565565973, rs565577484, rs565580554, rs565588271, rs565594966, rs565596579, rs565597881, rs565602452, rs565602594, rs565603790, rs565613195, rs565618511, rs565618665, rs565621291, rs565622105, rs565622472, rs565624445, rs565624967, rs565626734, rs565631177, rs565644780, rs565646434, rs565646635, rs563928881, rs563939836, rs563951099, rs563952695, rs563958407, rs563959340, rs563960087, rs563966716, rs563967070, rs563970987, rs563972693, rs563976814, rs563981208, rs563984104, rs563987110, rs563991204, rs563992973, rs563997006, rs563999520, rs564009957, rs564010373, rs564010532, rs564012813, rs564016729, rs564017807, rs564020680, rs564020799, rs564026318, rs564047497, rs564048480, rs564059849, rs564060394, rs564065065, rs564069452, rs564070074, rs564074561, rs564085050, rs564087606, rs564091462, rs564095145, rs564097610, rs564104786, rs564113854, rs564113877, rs564117624, rs564123922, rs564128890, rs564129151, rs564131155, rs564152505, rs564153420, rs564153591, rs564153983, rs564159422, rs564160618, rs564161190, rs564162221, rs564163406, rs564170454, rs564170933, rs564177660, rs564180172, rs564183915, rs564185841, rs564192095, rs564192842, rs564196495, rs564200268, rs564236452, rs564253044, rs565653011, rs565655590, rs565657329, rs565660296, rs565664600, rs565666847, rs565669019, rs565669855, rs565679889, rs565685176, rs564402394, rs564403503, rs564422670, rs564425851, rs564426883, rs564428653, rs564429800, rs564440057, rs564441075, rs564444278, rs564445416, rs564448992, rs564455243, rs564458745, rs564468097, rs564469524, rs564470330, rs564470693, rs564471669, rs564481805, rs564484453, rs564486747, rs564487045, rs564502091, rs564507286, rs564515402, rs564537552, rs564550149, rs564555155, rs564555294, rs564562749, rs564566816, rs564571903, rs564575260, rs564581936, rs564583486, rs564591401, rs564598200, rs564612978, rs564617615, rs564631355, rs564636312, rs564648768, rs564648888, rs564651337, rs564656493, rs564660348, rs564662027, rs564668297, rs564670685, rs564677974, rs564682294, rs564683319, rs564692546, rs564693303, rs564693534, rs564711632, rs564712784, rs564715803, rs564718371, rs564722767, rs564723594, rs564724496, rs564728332, rs564736701, rs564738333, rs564764485, rs564773960, rs564778064, rs564785542, rs564791878, rs564797704, rs564800504, rs567235314, rs567244670, rs567246010, rs567254872, rs564805421, rs564808472, rs564811719, rs564815022, rs564818317, rs564819627, rs564827125, rs564829613, rs564832825, rs564846454, rs564855954, rs564862327, rs564865816, rs564868824, rs564884599, rs564887769, rs564896551, rs564897274, rs564906037, rs564907177, rs564910869, rs564912035, rs564913485, rs564914083, rs564914786, rs564916195, rs564928870, rs564938821, rs564944167, rs564946157, rs564954601, rs564954920, rs564956549, rs564962470, rs564977078, rs564980815, rs564984171, rs564986408, rs565011483, rs565015190, rs565034934, rs565034995, rs565036260, rs565037931, rs565047430, rs565048168, rs565054645, rs565056320, rs565056854, rs565065355, rs565066718, rs565067812, rs565075395, rs565078636, rs565087982, rs565092497, rs565092694, rs565097027, rs565101972, rs565119691, rs565126820, rs565127444, rs565136450, rs565139104, rs565139357, rs565144054, rs565163445, rs565164608, rs565166483, rs565166847, rs565179511, rs565191100, rs565191945, rs565202996, rs565207712, rs565208216, rs565219063, rs565224885, rs565233394, rs565926308, rs565939433, rs565939942, rs565945441, rs565951010, rs565952918, rs565953539, rs565959607, rs565970229, rs565973250, rs565974251, rs565977795, rs565980573, rs565981443, rs565981492, rs565982031, rs565984456, rs566008145, rs566014203, rs566016445, rs566017203, rs566017501, rs566031451, rs566032740, rs566032782, rs566038803, rs566042667, rs566044655, rs566048032, rs566064155, rs566068767, rs566070142, rs566074954, rs566081366, rs566082396, rs566084952, rs566093238, rs566100398, rs566100481, rs566102937, rs566155841, rs566160205, rs566161695, rs566164047, rs566168907, rs566173275, rs566175503, rs566182163, rs566188056, rs566192162, rs567818731, rs567820011, rs567823129, rs567830461, rs567830725, rs567842494, rs567849075, rs567851591, rs567852817, rs567853034, rs567858546, rs567859162, rs567859588, rs567862614, rs567863556, rs567865535, rs567869327, rs567876971, rs567878982, rs566193269, rs566197735, rs566198917, rs566199663, rs566205205, rs566208006, rs566215028, rs566217795, rs566218061, rs566220452, rs566223994, rs566225072, rs566229034, rs566231091, rs566234207, rs566234638, rs566243354, rs566248160, rs566249607, rs566254593, rs566262922, rs566265336, rs566269058, rs566277016, rs566315204, rs566315405, rs566315825, rs566318323, rs566334968, rs566338451, rs566340534, rs566340904, rs566341308, rs566343491, rs566343652, rs566349970, rs566356309, rs566357608, rs566358570, rs566360253, rs566367058, rs566368131, rs566373680, rs566375326, rs566388744, rs566391928, rs566395539, rs566397541, rs566397634, rs566399712, rs566399740, rs566408531, rs566415610, rs566419126, rs566423663, rs566424150, rs566425386, rs566433665, rs566434662, rs566451867, rs566454504, rs566457619, rs566460527, rs566462983, rs566464313, rs566464965, rs566465109, rs566466408, rs566476560, rs566478066, rs566485546, rs566490081, rs566491110, rs566494348, rs566496657, rs566504141, rs566504872, rs566510126, rs566522525, rs566523872, rs566528319, rs566528445, rs566528508, rs566533047, rs566539821, rs566549348, rs566555188, rs566558388, rs566561409, rs566562233, rs566563854, rs566565608, rs566565660, rs566571154, rs566572061, rs566575416, rs566577256, rs566577388, rs566579650, rs566588722, rs566589229, rs566599376, rs566600108, rs566623817, rs566627612, rs566630777, rs566633994, rs566638195, rs568369254, rs568372920, rs568384204, rs568395695, rs568404248, rs568418108, rs568418929, rs568433511, rs568434113, rs568437787, rs566638990, rs566645043, rs566661890, rs566664878, rs566666475, rs566666793, rs566666855, rs566667114, rs566675995, rs566680106, rs566681100, rs566681301, rs566684557, rs566687407, rs566693411, rs566697867, rs566698995, rs566699062, rs566715596, rs566715797, rs566723851, rs566725531, rs566726325, rs566727810, rs566734175, rs566740328, rs566744068, rs566756229, rs566759173, rs566764022, rs566773414, rs566774227, rs566775339, rs566775651, rs566778434, rs566780240, rs566785413, rs566798780, rs566800209, rs566803412, rs566804996, rs566808926, rs566812534, rs566812585, rs566817703, rs566817826, rs566819598, rs566833643, rs566835050, rs566839865, rs566841521, rs566848934, rs566853691, rs566877337, rs565686681, rs565692301, rs565696182, rs565698338, rs565703228, rs565704554, rs565705381, rs565713586, rs565718621, rs565719848, rs565721002, rs565725149, rs566883264, rs566884071, rs566886908, rs566889433, rs566889666, rs566893789, rs566893853, rs566895228, rs566899727, rs566899755, rs566901718, rs566902434, rs566904662, rs566905338, rs566917385, rs566925279, rs566928391, rs566929138, rs566939407, rs566942146, rs566947916, rs566949986, rs566956382, rs566962925, rs566974528, rs566988477, rs566989980, rs566993476, rs566999122, rs566999456, rs567026635, rs567033200, rs568860557, rs568860985, rs568862649, rs568862924, rs567034192, rs567034710, rs567041466, rs567043292, rs567057136, rs567069021, rs567079967, rs567082853, rs567090251, rs567092209, rs567093569, rs567093838, rs567102191, rs567105669, rs567107100, rs567107275, rs567110178, rs567112625, rs567115528, rs567116115, rs567120214, rs567127715, rs567133872, rs567134081, rs567135099, rs567136018, rs567141901, rs567142195, rs567144879, rs567147047, rs567163064, rs567166572, rs567167252, rs567178186, rs567180008, rs567182934, rs567199166, rs567216163, rs567219658, rs567222203, rs567257666, rs567265265, rs567266549, rs567273272, rs567285105, rs567286884, rs567290049, rs567294421, rs567294961, rs567294996, rs567295531, rs567296178, rs567300439, rs567301497, rs567302083, rs567302148, rs567307657, rs567316133, rs567316482, rs567333661, rs567336247, rs567338848, rs567340759, rs567350812, rs567353770, rs567356657, rs567362141, rs567364530, rs567367246, rs567375566, rs567379962, rs567384174, rs567384755, rs567385461, rs567386451, rs567396888, rs567397309, rs567398949, rs567403072, rs567405706, rs567411928, rs567417135, rs567420560, rs567426537, rs567436097, rs567436672, rs567436957, rs567448115, rs567467017, rs567480276, rs567481008, rs567481189, rs567486697, rs567494950, rs567495629, rs567500289, rs565732081, rs565739370, rs565749814, rs565756845, rs565757271, rs565758513, rs565761197, rs565763764, rs565768535, rs565773443, rs565777055, rs565777544, rs565787995, rs565797059, rs565798673, rs565809019, rs565814065, rs565815478, rs565816040, rs565824644, rs565832525, rs565833586, rs565838299, rs565843122, rs567592675, rs569451543, rs569451769, rs569456222, rs569464249, rs569471494, rs569473105, rs567599963, rs567603104, rs567604864, rs567608281, rs567613582, rs567614187, rs567615327, rs567628029, rs567629621, rs567632798, rs567642825, rs567645793, rs567663664, rs567667065, rs567667490, rs567673079, rs567676337, rs567687227, rs567693846, rs567696675, rs567696980, rs567711414, rs569603016, rs569603948, rs569604830, rs569604939, rs569634794, rs569637392, rs569637954, rs569638035, rs567714521, rs567715767, rs567720248, rs567728586, rs567731148, rs567736630, rs567738575, rs567739852, rs567745776, rs567751526, rs567752333, rs567752967, rs567759150, rs567762705, rs567763570, rs567767851, rs567772901, rs567779423, rs567785995, rs567792395, rs567798443, rs567798776, rs567801106, rs567805568, rs567809155, rs567814148, rs567879845, rs567890354, rs567891212, rs567891757, rs567891928, rs567899357, rs567899671, rs567904351, rs567909738, rs567909997, rs567923858, rs567924081, rs567927506, rs567937726, rs567938113, rs567942605, rs567945710, rs567948788, rs567954031, rs567959094, rs567960510, rs567967630, rs567971151, rs567977017, rs567981957, rs567982067, rs567982579, rs567986425, rs567990535, rs567991461, rs567998695, rs568002246, rs568020837, rs568021231, rs568025068, rs568033563, rs568034367, rs568040458, rs568041008, rs568049255, rs568050910, rs568055213, rs568057513, rs568058643, rs568065949, rs568078103, rs568080422, rs568089645, rs568096538, rs568101566, rs568103162, rs568104823, rs568109513, rs568109610, rs568126291, rs568132486, rs568154137, rs568154494, rs568155686, rs568165038, rs568167877, rs568170530, rs568171545, rs568172942, rs568181329, rs568181794, rs568182423, rs568187811, rs568189054, rs568192450, rs568196563, rs568196800, rs568207849, rs568209107, rs568217275, rs568227774, rs568228900, rs568234809, rs568240289, rs568240688, rs568247581, rs568250594, rs568263900, rs568271695, rs568274163, rs568274347, rs568274718, rs568278361, rs568282164, rs568294316, rs568294858, rs568296702, rs568297833, rs568314778, rs568316736, rs568322467, rs568324660, rs568330011, rs568330968, rs568333988, rs568334668, rs568340531, rs568344944, rs568346935, rs568354076, rs568360243, rs568361702, rs568367736, rs568440765, rs568441814, rs568447764, rs568447914, rs568449600, rs568458960, rs568462145, rs568464859, rs568469468, rs568470695, rs568478833, rs568486496, rs568489142, rs568492472, rs568501157, rs568507920, rs568508005, rs568519053, rs568523209, rs568524398, rs568524644, rs568535332, rs568535874, rs568536244, rs568537908, rs568544678, rs568547045, rs568547391, rs568552692, rs568562460, rs568563994, rs568565798, rs568575597, rs568576354, rs568576710, rs568580426, rs568580498, rs568586713, rs568595314, rs568598082, rs568598684, rs568602116, rs568604459, rs568607988, rs568615935, rs568620493, rs568622203, rs570497748, rs570499433, rs570508076, rs570511801, rs570523609, rs570533692, rs570540355, rs570543242, rs570546728, rs568624784, rs568634338, rs568639757, rs568647749, rs568648664, rs568662273, rs568662719, rs568667588, rs568669825, rs568671194, rs568676654, rs568680767, rs568681841, rs568684266, rs568689494, rs568690270, rs568695261, rs568703649, rs568705303, rs568709996, rs568724094, rs568724178, rs568731514, rs568738832, rs568744251, rs568749772, rs568751069, rs568753379, rs568763752, rs568767630, rs568769542, rs568777758, rs568781260, rs568790098, rs568792032, rs568796495, rs568796519, rs568797823, rs568810068, rs568811618, rs568812362, rs568814137, rs568816860, rs568820726, rs568829289, rs568834332, rs568834928, rs568834984, rs568845866, rs568851259, rs568853968, rs568863656, rs568870303, rs568871724, rs568883527, rs568883883, rs568887303, rs568889389, rs568890408, rs568892704, rs568898460, rs568909549, rs568909738, rs568911989, rs568924829, rs568932299, rs568936242, rs568942438, rs568944856, rs568945920, rs568949596, rs568954208, rs568960531, rs568975927, rs568977097, rs568979802, rs568981658, rs568985294, rs568987239, rs568998719, rs569010302, rs569010623, rs569012287, rs569014068, rs569026409, rs569035259, rs569036913, rs569065893, rs569069564, rs569071558, rs569072818, rs569092395, rs569101435, rs569103479, rs569109896, rs569119238, rs569129505, rs569129521, rs569134735, rs569137373, rs569140985, rs569143080, rs569150417, rs569150791, rs569150851, rs569152048, rs569155107, rs569158778, rs569159469, rs569168013, rs569271531, rs569284679, rs569292676, rs569301377, rs569306327, rs569322712, rs569325830, rs569326455, rs569484465, rs569505153, rs569507476, rs569510425, rs569511293, rs569519630, rs569520570, rs569523068, rs569528164, rs569531231, rs569533291, rs569544834, rs569552377, rs569569255, rs569574624, rs569576510, rs569579165, rs569586460, rs569595367, rs569595989, rs569597059, rs569600276, rs569639669, rs569641630, rs569642113, rs569653357, rs569661930, rs569665251, rs569666727, rs569672466, rs569676256, rs569678136, rs569680025, rs569680854, rs569685442, rs569689044, rs569690154, rs569690464, rs569692117, rs569693472, rs569701052, rs569709010, rs569710117, rs569716482, rs569718850, rs569753914, rs569761954, rs569768353, rs569768441, rs569770862, rs569773954, rs569776636, rs569779863, rs569784917, rs569787016, rs569788087, rs569794436, rs569802461, rs569810744, rs569813220, rs569814089, rs569817447, rs569822851, rs569823263, rs569839077, rs569840223, rs569845335, rs569849447, rs569860595, rs569881310, rs569883094, rs569888716, rs569899964, rs569899972, rs569900402, rs569902054, rs569903078, rs569903520, rs569909414, rs569916243, rs569927782, rs569927897, rs569930230, rs569931277, rs569934392, rs569938872, rs569939106, rs569955625, rs569955993, rs569961833, rs569964299, rs569966815, rs569978161, rs569986426, rs569992445, rs569994914, rs569995786, rs570000203, rs570000655, rs570003072, rs570006567, rs570007066, rs570022776, rs570028180, rs570028357, rs570029668, rs570030664, rs570045673, rs570048407, rs570049382, rs570056903, rs570057124, rs570060712, rs570066340, rs570077029, rs570080520, rs570083793, rs570084612, rs570085384, rs570093760, rs570095271, rs570097188, rs570100769, rs570110941, rs570116269, rs570134750, rs570136833, rs570139599, rs570144028, rs570152844, rs570155540, rs570156933, rs570157544, rs570158064, rs570164225, rs570164254, rs570171651, rs570178092, rs570182926, rs570186763, rs570187956, rs570188623, rs570188724, rs570192397, rs570192976, rs570197203, rs570204493, rs570210214, rs570221642, rs570232763, rs570238116, rs570238732, rs570240440, rs570267186, rs570270558, rs570271706, rs570272114, rs570276849, rs570280258, rs570281126, rs570297975, rs570304559, rs570305076, rs570308539, rs570315016, rs570316483, rs570320441, rs570320906, rs570343196, rs570349669, rs570350837, rs570351684, rs570352179, rs570352913, rs570354393, rs570370217, rs570371282, rs570377410, rs570380584, rs570388089, rs570388328, rs570389959, rs570390363, rs570390887, rs570401326, rs570401867, rs570403398, rs570406282, rs570415465, rs570417819, rs570422331, rs570431265, rs570446296, rs570447819, rs570453706, rs570454974, rs570460787, rs570462505, rs570467186, rs570476577, rs570477468, rs570484418, rs570494387, rs569174865, rs569177822, rs569180276, rs569187119, rs569188266, rs569188934, rs569192718, rs569200325, rs569205032, rs569206025, rs569206624, rs569207269, rs569212043, rs569213948, rs569222137, rs569223722, rs569232500, rs569232548, rs569246096, rs569248144, rs569248224, rs569248260, rs569253641, rs569259221, rs569263730, rs569265558, rs569269095, rs569334298, rs569340113, rs569340654, rs567500680, rs567501804, rs567504710, rs567506695, rs567509930, rs567510152, rs569348764, rs569349918, rs569352914, rs569354256, rs567529504, rs567533865, rs569357579, rs569360505, rs569360828, rs569361684, rs569364109, rs569376783, rs569378101, rs569399677, rs569415154, rs569418372, rs569423170, rs569424076, rs569425885, rs569427316, rs569427341, rs569427854, rs569432745, rs569432959, rs569437197, rs569447234, rs567537186, rs567538221, rs567547341, rs567550217, rs567554582, rs567555222, rs567556696, rs567563493, rs567569979, rs567571818, rs567573264, rs567574964, rs567585645, rs567587412, rs567589525, rs567592453, rs571082325, rs572433340, rs572433347, rs571091476, rs571095268, rs571097798, rs571103638, rs571103981, rs571104743, rs571106405, rs571112833, rs571113738, rs571256798, rs571261672, rs571263120, rs571275392, rs571279318, rs571289613, rs571292161, rs571294621, rs571301412, rs571308572, rs570553166, rs570557809, rs570562671, rs570567964, rs570568770, rs570575752, rs570580064, rs570585696, rs570591203, rs570592176, rs570596291, rs570600792, rs570609614, rs570612328, rs570615615, rs570622613, rs570626737, rs570627970, rs570636028, rs570642767, rs570643208, rs570650925, rs570652321, rs570655823, rs570667996, rs570679450, rs570686647, rs570687204, rs570696604, rs570703829, rs570711559, rs572660496, rs572673195, rs572673904, rs572675363, rs572681164, rs572689196, rs572690398, rs572691439, rs572694223, rs570716621, rs570735738, rs570737317, rs570760322, rs570766247, rs570767257, rs570769131, rs570774477, rs570778444, rs570782031, rs570787103, rs570789101, rs570799478, rs570808408, rs570809903, rs570817591, rs570818738, rs572438710, rs572442698, rs572443570, rs572462386, rs572464469, rs572473948, rs572474775, rs572475618, rs572476294, rs572477366, rs571118676, rs571122261, rs571124930, rs571132849, rs571141319, rs571147978, rs571151318, rs571152922, rs571161112, rs571161334, rs571162125, rs571172714, rs571188052, rs571188993, rs571191449, rs571194801, rs571203654, rs571205562, rs571206341, rs571212046, rs571212308, rs571217463, rs571222583, rs571223547, rs571224141, rs571226035, rs571229543, rs571234904, rs571239119, rs571242430, rs571242725, rs571244305, rs571245636, rs571245915, rs572478244, rs572484998, rs572495185, rs572501606, rs572508321, rs572508694, rs572515380, rs572527252, rs572532033, rs572532787, rs571312284, rs571313556, rs571314447, rs571327416, rs571330840, rs571338014, rs571339990, rs571341134, rs571348536, rs571351344, rs571355727, rs571360832, rs571361370, rs571367479, rs571368125, rs571373935, rs571374872, rs571376396, rs571379096, rs571379716, rs571382225, rs571391060, rs571399857, rs571399916, rs571402929, rs571403549, rs571405276, rs571406589, rs571410114, rs571412629, rs571417908, rs571427871, rs571431287, rs571436621, rs571452288, rs571453177, rs571455664, rs571461315, rs571462301, rs571465181, rs571466095, rs571468356, rs571480896, rs571482787, rs571493578, rs571495577, rs571495987, rs571496750, rs571506123, rs571507295, rs571511880, rs571513241, rs571519381, rs571531733, rs571534207, rs571555750, rs571556547, rs571559110, rs571561939, rs571571066, rs571573717, rs571575371, rs571577300, rs571582950, rs571584217, rs571589011, rs571600707, rs571627313, rs571638275, rs571644257, rs571647835, rs571653254, rs571674086, rs571675141, rs571676488, rs571691568, rs571703404, rs571714508, rs571715093, rs571720889, rs571735768, rs571740587, rs571741493, rs571743317, rs571743791, rs571751210, rs571752614, rs571756764, rs571758493, rs571765758, rs571777648, rs571783600, rs571784721, rs571786847, rs571795980, rs571796465, rs571798541, rs571800801, rs571805179, rs571807951, rs571808279, rs571808575, rs571808857, rs571811061, rs571831286, rs571834273, rs571836367, rs571845117, rs571851640, rs571856275, rs571861122, rs571874190, rs571890353, rs571892025, rs571900209, rs571907636, rs571908575, rs571909575, rs571911876, rs571912141, rs571913582, rs571916681, rs571920191, rs571926490, rs571930482, rs571931049, rs571937519, rs571940864, rs571941234, rs571943164, rs571945895, rs571947790, rs571948927, rs571952854, rs571958177, rs571958505, rs571965897, rs571971920, rs571978650, rs571980036, rs571983660, rs571991637, rs571992706, rs571995663, rs572005305, rs572008325, rs572008421, rs572008884, rs572015332, rs572533404, rs573662149, rs573662801, rs572539932, rs572542722, rs572544350, rs572545561, rs572547081, rs572555271, rs572559280, rs572563636, rs572567482, rs572567888, rs572572733, rs572573741, rs572575510, rs572577499, rs572585221, rs572586509, rs572596235, rs572601185, rs572606651, rs570821445, rs570826433, rs570832413, rs570834399, rs570835610, rs570838896, rs570844374, rs570854654, rs570856838, rs570860717, rs570861304, rs570863673, rs570864851, rs570865668, rs570869653, rs570878706, rs570882162, rs570902434, rs570904943, rs570907889, rs570909596, rs570911826, rs570912404, rs570914724, rs570918525, rs570922195, rs570924267, rs570926129, rs570938436, rs570938738, rs570941803, rs570944544, rs570945410, rs570953242, rs570956723, rs570959225, rs570965043, rs570967763, rs570968029, rs570968833, rs570969971, rs570973631, rs570975545, rs570978983, rs570982699, rs570993753, rs571000281, rs571002353, rs571008251, rs571011730, rs571012144, rs571019432, rs571020373, rs571027253, rs571031226, rs571034634, rs571035066, rs571035111, rs571039332, rs571045647, rs571047083, rs571048670, rs571052561, rs572043014, rs572044723, rs572047281, rs572055380, rs572056796, rs572057344, rs574063104, rs574067748, rs574078063, rs574079599, rs574086583, rs574092717, rs572059631, rs572063259, rs572065679, rs572073829, rs572079037, rs572079591, rs572079996, rs572081647, rs572086343, rs572087690, rs572093279, rs572100521, rs572105138, rs572110131, rs572113170, rs572113747, rs572115736, rs572116461, rs572136992, rs572137525, rs572141469, rs571059319, rs571065835, rs571067198, rs571067270, rs571071675, rs571078051, rs571078701, rs571079635, rs572144644, rs572145088, rs572151510, rs572152175, rs572164553, rs572172764, rs572179905, rs572181815, rs572184634, rs572187047, rs572190471, rs572201831, rs572206079, rs572206962, rs572209358, rs572225710, rs572226957, rs572231642, rs572236815, rs572236981, rs572238685, rs572250545, rs572262654, rs572268792, rs572271412, rs572273778, rs572279121, rs572279456, rs572281036, rs572286847, rs572299700, rs572301668, rs572310977, rs572312596, rs572313771, rs572317619, rs572337272, rs572344814, rs572346190, rs572357924, rs572357936, rs572369160, rs572385184, rs572386490, rs572392890, rs572398554, rs572398564, rs572400412, rs572407104, rs572425214, rs572431198, rs572820976, rs574480981, rs574484515, rs574484950, rs574486340, rs574495282, rs574501531, rs572822831, rs572832408, rs572833712, rs572848622, rs572850106, rs572857767, rs572868139, rs572870926, rs572876013, rs572878159, rs572878456, rs572879494, rs572882998, rs572887683, rs572890029, rs572895406, rs572901540, rs572905404, rs572915448, rs572919838, rs572931608, rs572932032, rs572935909, rs572937509, rs572938358, rs572945196, rs572947489, rs572956714, rs572960610, rs572963788, rs572975613, rs572975907, rs572980560, rs572983605, rs572984943, rs572986169, rs572990840, rs572992522, rs572998179, rs573001304, rs573003270, rs573008630, rs573008779, rs573012526, rs573018157, rs573019416, rs573020436, rs573021380, rs573025256, rs573033595, rs573034813, rs573039979, rs573044208, rs573049873, rs573067771, rs573071463, rs573073762, rs573075004, rs573081068, rs573088886, rs573091117, rs573093317, rs573095660, rs573096494, rs573097405, rs573098660, rs573098776, rs573102115, rs573103306, rs573108426, rs573115078, rs573115343, rs573117347, rs573120226, rs573129611, rs573137217, rs573138996, rs573140372, rs573142870, rs573145776, rs573146525, rs573150715, rs573153198, rs573154950, rs573156161, rs573158409, rs573161861, rs573164053, rs573170806, rs573181460, rs573183548, rs573184494, rs573186660, rs573198458, rs573202921, rs573204784, rs573207833, rs573208400, rs573208696, rs573210402, rs573210447, rs573212223, rs573217319, rs573223809, rs573236080, rs573237297, rs573240873, rs573241029, rs573247914, rs573250577, rs573253547, rs573259146, rs573261657, rs573266570, rs573274124, rs573277119, rs573277546, rs573286265, rs573287715, rs573287985, rs573300583, rs573302500, rs573311246, rs573317272, rs573321163, rs573330241, rs573330284, rs573346395, rs573350169, rs573359482, rs573360733, rs573368524, rs573372787, rs573372802, rs573373012, rs573376073, rs573383438, rs573387525, rs573387552, rs573389771, rs573391506, rs573393796, rs573395219, rs573401141, rs573401703, rs573408675, rs573412899, rs573419777, rs573423474, rs573427495, rs573441362, rs573447050, rs573461147, rs573470719, rs573472780, rs573482069, rs573486319, rs573487250, rs573493500, rs573498254, rs573500176, rs573506227, rs573511220, rs573511374, rs573512496, rs573512761, rs573514425, rs573515584, rs573519503, rs573527550, rs573529347, rs573530806, rs573546780, rs573551071, rs573554859, rs573556449, rs573558000, rs573558578, rs573558958, rs573563174, rs573566899, rs573568358, rs573568688, rs573573360, rs573577211, rs573578965, rs573579986, rs573587517, rs573588674, rs573590958, rs573594480, rs573601918, rs573607377, rs573608180, rs573608456, rs573611441, rs573628935, rs573644177, rs573644324, rs573645270, rs573659093, rs573659984, rs573669951, rs573676095, rs573676427, rs573679768, rs573680117, rs573686623, rs573688384, rs573688584, rs573688869, rs573697394, rs572607598, rs572613074, rs572623030, rs572623214, rs572624137, rs572627174, rs572630457, rs572630622, rs572646049, rs572655087, rs572697750, rs572699930, rs572705714, rs572709166, rs572715038, rs572718535, rs572728961, rs572729385, rs572754753, rs572768630, rs575629507, rs575639416, rs575642492, rs575645439, rs575648363, rs575649526, rs575649606, rs572770367, rs572780716, rs572795455, rs572796726, rs572798031, rs572804943, rs572811327, rs572812468, rs573928831, rs573930499, rs573934077, rs573937231, rs573939361, rs573941798, rs573944484, rs573951029, rs573951174, rs573957945, rs573975051, rs573979204, rs573987792, rs573989304, rs573995499, rs573996433, rs574005641, rs574008030, rs574010025, rs574011117, rs574016724, rs574020887, rs574026314, rs574029342, rs574035905, rs574045121, rs574046025, rs574048789, rs574057452, rs574057677, rs574058344, rs574058878, rs574062370, rs574094476, rs574094624, rs574102080, rs574114609, rs574115148, rs574120144, rs574120447, rs574121718, rs574125917, rs574129455, rs574132226, rs574134301, rs574142655, rs574143307, rs574143644, rs574156471, rs574156784, rs574165757, rs574165897, rs574172984, rs574179486, rs574201711, rs574204576, rs574208720, rs574212220, rs574214117, rs574214406, rs574223078, rs574226057, rs574234255, rs574242259, rs574250953, rs574257817, rs574265174, rs574265245, rs574284293, rs574285527, rs574286466, rs574287161, rs574296023, rs574296055, rs574297392, rs574299451, rs574300677, rs574309857, rs574318549, rs574319351, rs574322076, rs574512501, rs576086641, rs574519343, rs574522467, rs574523972, rs574526443, rs574535397, rs574551172, rs574561793, rs574562902, rs574567087, rs574568053, rs574571641, rs574582410, rs574585687, rs574585967, rs574593061, rs574594496, rs574603507, rs574604285, rs574611404, rs574612138, rs574614840, rs574614932, rs574617568, rs574618905, rs574630342, rs574631443, rs574637839, rs574639588, rs574642738, rs574642781, rs574644692, rs574645337, rs574646625, rs574652225, rs574655363, rs574657394, rs574672396, rs574674543, rs574681142, rs574683611, rs574700971, rs574704244, rs574711844, rs574720007, rs574720729, rs574723087, rs574734514, rs574740913, rs574750450, rs574752902, rs574756070, rs574759675, rs574760223, rs574766045, rs574772413, rs574773256, rs574775852, rs574790593, rs574790794, rs574792375, rs574797103, rs574810156, rs574810962, rs574811704, rs574823264, rs574826354, rs574830520, rs574833117, rs574833479, rs574837882, rs574840145, rs574842541, rs574846920, rs574854834, rs574855093, rs574856957, rs574862879, rs574865022, rs574872149, rs574875586, rs574880101, rs574882109, rs574885036, rs574887007, rs574889658, rs574914486, rs574923739, rs574927795, rs574945147, rs574947645, rs574957409, rs574958083, rs574963932, rs574964007, rs574975461, rs574979632, rs574985220, rs574985850, rs574986901, rs574993231, rs574993705, rs575000999, rs575002342, rs575003754, rs575020435, rs575024426, rs575024606, rs575027453, rs575030156, rs575045559, rs575048029, rs575070157, rs575071701, rs576628816, rs576628882, rs576630225, rs576639802, rs576661976, rs576666600, rs576680930, rs576689168, rs576694168, rs576696051, rs576697074, rs576699832, rs576708797, rs576710675, rs576714215, rs576723747, rs576724099, rs576734438, rs576737215, rs576739849, rs576747326, rs576755480, rs576757020, rs576763176, rs576772689, rs576777856, rs576779157, rs576784812, rs576787192, rs576789856, rs576791931, rs576805364, rs575072785, rs575075157, rs575078401, rs575081867, rs575082126, rs575096988, rs575099418, rs575107489, rs575108450, rs575108930, rs575111880, rs575117110, rs575118738, rs575124778, rs575126245, rs575133738, rs575137044, rs575149505, rs575151997, rs575153035, rs575156751, rs575172409, rs575176668, rs575177372, rs575180197, rs575185036, rs575189789, rs575191527, rs575198676, rs575203856, rs575214111, rs575215747, rs575217353, rs575217653, rs575218167, rs575219547, rs575226540, rs575227063, rs575237215, rs575240253, rs575241760, rs575244843, rs575253510, rs575257750, rs575268835, rs575270713, rs575280338, rs575281803, rs575287976, rs575288865, rs575290522, rs575291979, rs575299204, rs575306713, rs575317626, rs575320375, rs575328893, rs575336453, rs575337404, rs575339188, rs575347797, rs575351011, rs575357155, rs575359936, rs575360478, rs575374396, rs575375170, rs575380411, rs575381574, rs575384223, rs575394978, rs575399099, rs575405390, rs575406759, rs575408681, rs575409585, rs575412409, rs575420382, rs575424869, rs575425384, rs575432819, rs575432995, rs575441900, rs575443181, rs575445325, rs575449873, rs575451786, rs575452407, rs575459668, rs575460890, rs575466223, rs575468235, rs575474836, rs575481216, rs575486890, rs575498029, rs575502300, rs575505312, rs575505882, rs573705425, rs573708188, rs573724041, rs573728638, rs573729433, rs573731977, rs573736245, rs573747086, rs573748371, rs573748529, rs575510191, rs575515720, rs575529196, rs575536616, rs575561977, rs575565447, rs575568097, rs575568673, rs575573461, rs575594943, rs575595177, rs575598286, rs575604793, rs575609710, rs575616720, rs575621575, rs575626784, rs575628613, rs575628737, rs575660468, rs575661650, rs575664130, rs575666255, rs575667845, rs575674650, rs575677419, rs575684361, rs575689516, rs573752553, rs573759497, rs573764871, rs573779258, rs573779660, rs573785447, rs573790492, rs573799214, rs573807463, rs573809669, rs573810011, rs573812744, rs573817305, rs573821440, rs573824124, rs573824436, rs573828310, rs573835454, rs573843349, rs573846003, rs573851325, rs573853454, rs573857885, rs573858891, rs573863163, rs573865449, rs573874554, rs573875478, rs573892007, rs573898798, rs573910265, rs573915020, rs573923539, rs573924540, rs573928583, rs575690152, rs575694029, rs575695092, rs575695404, rs575703274, rs575710905, rs575711051, rs575711431, rs575712185, rs575715880, rs575720501, rs575725137, rs575727291, rs575732231, rs575732974, rs575738266, rs575744021, rs575745641, rs575749267, rs575749315, rs575750736, rs575776051, rs575780485, rs575789699, rs575790064, rs575791092, rs575791147, rs575791980, rs575810410, rs575813178, rs575813295, rs575821054, rs575823196, rs575827721, rs575828801, rs575829044, rs575833684, rs575834216, rs575839917, rs575842887, rs575847036, rs575850136, rs575857674, rs575866703, rs575871923, rs575874436, rs575876712, rs575881623, rs575883297, rs575892417, rs575896679, rs575897586, rs575902384, rs575913122, rs575913874, rs575914720, rs575917678, rs575921354, rs575932042, rs575938773, rs574323129, rs574325793, rs574336219, rs574342840, rs574344905, rs574345276, rs574347052, rs574347437, rs574351287, rs574361172, rs574376559, rs574377883, rs574388378, rs574395091, rs574400190, rs574404014, rs574407468, rs574408704, rs574411901, rs574417785, rs574419716, rs574428841, rs574431128, rs574431916, rs574434216, rs574439176, rs574443198, rs574453918, rs574462188, rs574467219, rs574471030, rs574471817, rs574476862, rs576087031, rs576088621, rs576093384, rs576107099, rs576108315, rs576110112, rs576112992, rs576117970, rs576120547, rs576122909, rs576126668, rs576135295, rs576139171, rs576147029, rs576151613, rs576157559, rs576159442, rs576163102, rs576166244, rs576167546, rs576169940, rs576189871, rs576193226, rs576195565, rs576200205, rs576203475, rs576203695, rs576205039, rs576205961, rs576211594, rs576217519, rs576220882, rs576222710, rs576223018, rs576231733, rs576239826, rs576247801, rs576248345, rs576252850, rs576254805, rs576258599, rs576265349, rs576267107, rs576272005, rs576273852, rs576274817, rs576275438, rs576275745, rs576283371, rs576285186, rs576304672, rs576309311, rs576316406, rs576323743, rs576329765, rs576330474, rs576338035, rs576338395, rs576338755, rs576345730, rs576346962, rs576357331, rs576362502, rs576376809, rs576381071, rs576385399, rs576388158, rs576389972, rs576398163, rs576400450, rs576400894, rs576401011, rs576401387, rs576409042, rs576410080, rs576415396, rs576418186, rs576420894, rs576423811, rs576423872, rs576425178, rs576434816, rs576446858, rs576447958, rs576452467, rs576452599, rs576455639, rs576456650, rs576461490, rs576461976, rs576471028, rs576486875, rs576489010, rs576494301, rs576510615, rs576511304, rs576513985, rs576516441, rs576517907, rs576539016, rs576540728, rs576547342, rs576554713, rs576575833, rs576576326, rs576580276, rs576587731, rs576595116, rs576603288, rs576611653, rs576617574, rs576624309, rs576627351, rs575939537, rs575960095, rs575962149, rs575964189, rs575976524, rs575978771, rs575985044, rs575986286, rs576002271, rs576002341, rs576007055, rs576009601, rs576011462, rs576029693, rs576033399, rs576037725, rs576039802, rs576051578, rs576054004, rs576078186, rs576084207, rs576809768, rs576811990, rs576816514, rs576833346, rs576836540, rs576837637, rs576851239, rs576852751, rs576853133, rs576860242, rs576861947, rs576870471, rs576875570, rs576876781, rs576884719, rs576897690, rs576915900, rs576918293, rs576918792, rs576933165, rs576945926, rs576950540, rs576953387, rs576963086, rs576966148, rs576978298, rs576983066, rs576983411, rs576984989, rs577002180, rs577004512, rs577004767, rs577006929, rs577016285, rs577022026, rs577026619, rs577030477, rs577036020, rs577037304, rs577042252, rs577044460, rs577053648, rs577054087, rs577061661, rs577064983, rs577070468, rs577072916, rs577074156, rs577077249, rs577079769, rs577080324, rs577082817, rs577083977, rs577096176, rs577097077, rs577097510, rs577100864, rs577105213, rs577106515, rs577107818, rs577118626, rs577123703, rs577129129, rs577140435, rs577154677, rs577155544, rs577156081, rs577162774, rs577173433, rs577175837, rs577178189, rs577181350, rs577189279, rs577189309, rs577195852, rs577199669, rs577201927, rs577205177, rs577209949, rs577210261, rs577220280, rs577228621, rs577229941, rs577232982, rs577239255, rs577247465, rs577248580, rs577251201, rs577251325, rs577257561, rs577261598, rs577263604, rs577263927, rs577269345, rs577277470, rs577285599, rs577290911, rs577292587, rs577293476, rs577293698, rs577297468, rs577300249, rs577307651, rs577310512, rs577312444, rs577313554, rs577321294, rs577326496, rs577333197, rs577335072, rs577336202, rs577336326, rs577338747, rs577343909, rs577344964, rs577348870, rs577358499, rs577359783, rs577359930, rs577369315, rs577370332, rs577371293, rs577375772, rs577382773, rs577383027, rs577385938, rs577388785, rs577391742, rs577393562, rs577406554, rs577417665, rs577428439, rs577429167, rs577436295, rs577437059, rs577441012, rs577442184, rs577442416, rs577452171, rs577456715, rs577462590, rs577463317, rs577468546, rs577469194, rs577470874, rs577474317, rs577475028, rs577486252, rs577487221, rs577490330, rs577491007, rs577495037, rs577495213, rs577504008, rs577505444, rs577520151, rs577532897, rs577533174, rs577541014, rs577549821, rs577554877, rs577570274, rs577571189, rs577571990, rs577572888, rs577580335, rs577582212, rs577588831, rs577592334, rs577595412, rs577605110, rs577606965, rs577629391, rs577639049, rs577641432, rs577643772, rs577645660, rs577649028, rs577650288, rs577651185, rs577652969, rs577655920, rs577660426, rs577665023, rs577667577, rs577675347, rs577680325, rs577681400, rs577689393, rs577700693, rs577702909, rs577705746, rs577707002, rs577711455, rs577713395, rs577721722, rs577722284, rs577726333, rs577728365, rs577729466, rs577729842, rs577735191, rs577735915, rs577738753, rs577744995, rs577756840, rs577763966, rs745415806, rs745416740, rs745420137, rs745422687, rs745427507, rs745441754, rs745446740, rs745449695, rs745450936, rs745451096, rs745451562, rs745452728, rs745463105, rs745465889, rs745466839, rs745467388, rs745468896, rs745475671, rs745482329, rs745486559, rs745488528, rs745493951, rs745495060, rs745501112, rs745523877, rs745527362, rs745528298, rs745538185, rs745554137, rs745556175, rs745559772, rs745564267, rs745412988, rs745409379, rs745378263, rs745370327, rs745367056, rs745365779, rs745365046, rs745364933, rs745363589, rs745361729, rs745361072, rs745359422, rs745335128, rs745334493, rs745332019, rs745324663, rs745311455, rs745311120, rs730880252, rs727503993, rs727503992, rs727502851, rs727502850, rs578257719, rs578254282, rs578251646, rs578249824, rs578245443, rs578241478, rs578237978, rs578234848, rs578230711, rs578230031, rs578219646, rs578217844, rs578206830, rs578205928, rs578204295, rs578197836, rs578197149, rs578195560, rs578194855, rs578183193, rs578182140, rs578173209, rs578169681, rs578161227, rs578153733, rs578153291, rs578141245, rs578138715, rs578137336, rs578134709, rs578124003, rs578117696, rs578115874, rs578100043, rs578091244, rs578088157, rs578081414, rs578074784, rs578060262, rs578059042, rs578058432, rs578056935, rs578056236, rs578050343, rs578047269, rs578039825, rs578037314, rs578021313, rs578020852, rs578017073, rs578016589, rs578010786, rs578008798, rs577997903, rs577997301, rs577993763, rs577988782, rs577987710, rs577986782, rs577981702, rs577976159, rs577969085, rs577964941, rs577957511, rs577953130, rs577947775, rs577947757, rs577945290, rs577944153, rs577943235, rs577939235, rs577936545, rs577933987, rs577933971, rs577929950, rs577926679, rs577922240, rs577918963, rs577907865, rs577907623, rs577899096, rs577895227, rs577895022, rs577890854, rs577890830, rs577889927, rs577873623, rs577861393, rs577861348, rs577861069, rs577860239, rs577857604, rs577852348, rs577842682, rs577839340, rs577831627, rs577830095, rs577825757, rs577822202, rs577815702, rs577813143, rs577802460, rs577792088, rs577789621, rs577783575, rs577783047, rs577778743, rs577773269, rs577772406, rs577766184, rs745565928, rs745567582, rs745570761, rs745572274, rs745576166, rs745577630, rs745577729, rs745587676, rs745594100, rs745594515, rs745599533, rs745604761, rs745608328, rs745608419, rs745611338, rs745621491, rs745625084, rs745625142, rs745636653, rs745638005, rs745642152, rs745647209, rs745653941, rs745658970, rs745661797, rs745663593, rs745668536, rs745682334, rs745683188, rs745689867, rs745694909, rs745697134, rs745697344, rs745697361, rs745700158, rs745706621, rs745715079, rs745717741, rs745729906, rs745736213, rs745737453, rs745739085, rs745744090, rs745750496, rs745751300, rs745758098, rs745774538, rs745775633, rs745778333, rs745782593, rs745783092, rs745788119, rs745794010, rs745802662, rs745820797, rs745826237, rs745829684, rs745834153, rs745842506, rs745842621, rs745843103, rs745844005, rs745847076, rs745851233, rs745866291, rs745866311, rs745874905, rs745883039, rs745885337, rs745887431, rs745890735, rs745891017, rs745900058, rs745903122, rs745905858, rs745909747, rs745911515, rs745917723, rs745929074, rs745934641, rs745935460, rs745943103, rs745946322, rs745947740, rs745950946, rs745951880, rs745970809, rs745971876, rs745981712, rs745997606, rs746001013, rs746002339, rs746012505, rs746019110, rs746028012, rs746030072, rs746040186, rs746048395, rs746049305, rs746050014, rs746051487, rs746051721, rs746065882, rs746066430, rs746069321, rs746077104, rs746081562, rs746090703, rs746093311, rs746094316, rs746096312, rs746105955, rs746107210, rs746114691, rs746119954, rs746125625, rs746128821, rs746128834, rs746129153, rs746134270, rs746139311, rs746139683, rs746143728, rs746147862, rs746153092, rs746171125, rs746172357, rs746181726, rs746181857, rs746185972, rs746187178, rs746192088, rs746192424, rs746192671, rs746198691, rs746201268, rs746205509, rs746209240, rs746210574, rs746212944, rs746215178, rs746222880, rs746231125, rs746232565, rs746241235, rs746243041, rs746247564, rs746261867, rs746268010, rs746273023, rs746280682, rs746282087, rs746287996, rs746291076, rs746291473, rs746294400, rs746297064, rs746299198, rs746308157, rs746315279, rs746322206, rs746323507, rs746327071, rs746327370, rs746328751, rs746332249, rs746332409, rs746334169, rs746339123, rs746346714, rs746351937, rs746355059, rs746357566, rs746360211, rs746364163, rs746371661, rs746372228, rs746372774, rs746376885, rs746379078, rs746383105, rs746384760, rs746387141, rs746388466, rs746393308, rs746401347, rs746408344, rs746414216, rs746417253, rs746420134, rs746422487, rs746428930, rs746436898, rs746439450, rs746450773, rs746454157, rs746456796, rs746462305, rs746466747, rs746470263, rs746485902, rs746487692, rs746492572, rs746496046, rs746498429, rs746498883, rs746507416, rs746509226, rs746512408, rs746512754, rs746515823, rs746516691, rs746527344, rs746529542, rs746548293, rs746570219, rs746572535, rs746581710, rs746592005, rs746594646, rs746597841, rs746598819, rs746601019, rs746602392, rs746603765, rs746608333, rs746609613, rs746614629, rs746619837, rs746621344, rs746632365, rs746634837, rs746641607, rs746648346, rs746658480, rs746668212, rs746678525, rs746692025, rs746700227, rs746706154, rs746708170, rs746709556, rs746719231, rs746719977, rs746733373, rs746734243, rs746735303, rs746735873, rs746745097, rs746751141, rs746752879, rs746755930, rs746760856, rs746762473, rs746776957, rs746777267, rs746785436, rs746786809, rs746791449, rs746800668, rs746801822, rs746828381, rs746828385, rs746829285, rs746830567, rs746834636, rs746835015, rs746837091, rs746843084, rs746844753, rs746850486, rs746859022, rs746865204, rs746865593, rs746867569, rs746868915, rs746871144, rs746872031, rs746876362, rs746881916, rs746883617, rs746885936, rs746887279, rs746892823, rs746898932, rs746901074, rs746903974, rs746904093, rs746909727, rs746915184, rs746932671, rs746935278, rs746936365, rs746940381, rs746944682, rs746945111, rs746950606, rs746955248, rs746956204, rs746973499, rs746973537, rs746975980, rs746980372, rs746982718, rs746983547, rs746985600, rs746995071, rs746996469, rs747003375, rs747006772, rs747017539, rs747030892, rs747032847, rs747033109, rs747045951, rs747050195, rs747056088, rs747059725, rs747063854, rs747066640, rs747067213, rs747075110, rs747075189, rs747079043, rs747079088, rs747079932, rs747082136, rs747082541, rs747088325, rs747092026, rs747101726, rs747111802, rs747120796, rs747127930, rs747128502, rs747130509, rs747135349, rs747143352, rs747143724, rs747144447, rs747148871, rs747152998, rs747160988, rs747166611, rs747167481, rs747168286, rs747191318, rs747195220, rs747199645, rs747200845, rs747202717, rs747207905, rs747212090, rs747215316, rs747216489, rs747217321, rs747219273, rs747223051, rs747223249, rs747232495, rs747232739, rs747235701, rs747244432, rs747246881, rs747247922, rs747255851, rs747263215, rs747293774, rs747293880, rs747298799, rs747301854, rs747304679, rs747306237, rs747309607, rs747328009, rs747330231, rs747334408, rs747337948, rs747343207, rs747344839, rs747349942, rs747350413, rs747353950, rs747355110, rs747357297, rs747360734, rs747369631, rs747372403, rs747382881, rs747390882, rs747392184, rs747400667, rs747402508, rs747410822, rs747414125, rs747415282, rs747415664, rs747425407, rs747425627, rs747430769, rs747435501, rs747436845, rs747442560, rs747449459, rs747450089, rs747450107, rs747452068, rs747459049, rs747459599, rs747468258, rs747469905, rs747470082, rs747471585, rs747490361, rs747494566, rs747499319, rs747504284, rs747507125, rs747512289, rs747518932, rs747521421, rs747530997, rs747533056, rs747533240, rs747536991, rs747537607, rs747542165, rs747545402, rs747548105, rs747553285, rs747555665, rs747557612, rs747558550, rs747559303, rs747559484, rs747567057, rs747568779, rs747570979, rs747574764, rs747583305, rs747584954, rs747588732, rs747603472, rs747603608, rs747607043, rs747609789, rs747619876, rs747621078, rs747623583, rs747624066, rs747638971, rs747648737, rs747654263, rs747665402, rs747669986, rs747672746, rs747673187, rs747683929, rs747685890, rs747689631, rs747690674, rs747696206, rs747699633, rs747713961, rs747714599, rs747716454, rs747720477, rs747726782, rs747732168, rs747738574, rs747738698, rs747740826, rs747753430, rs747754806, rs747755670, rs747768540, rs747773688, rs747779519, rs747783456, rs747795505, rs747796948, rs747797297, rs747801310, rs747801962, rs747806877, rs747812880, rs747816577, rs747822187, rs747826561, rs747826761, rs747843786, rs747847327, rs747856074, rs747860244, rs747861094, rs747863973, rs747866503, rs747867248, rs747884140, rs747885988, rs747896918, rs747904768, rs747917348, rs747920259, rs747921422, rs747941827, rs747944453, rs747951844, rs747952930, rs747953127, rs747959849, rs747963781, rs747965050, rs747970687, rs747975419, rs747980729, rs747980792, rs747981946, rs747984525, rs747992705, rs747994994, rs747995786, rs747996563, rs747998780, rs747999135, rs748011930, rs748024014, rs748025088, rs748028663, rs748041025, rs748045435, rs748048151, rs748054347, rs748068506, rs748075026, rs748083531, rs748086405, rs748091746, rs748093487, rs748106279, rs748107777, rs748108576, rs748114566, rs748117721, rs748127741, rs748137246, rs748142422, rs748143226, rs748143298, rs748144223, rs748150290, rs748160882, rs748163888, rs748186900, rs748189692, rs748189857, rs748190600, rs748192857, rs748198674, rs748201053, rs748201136, rs748201717, rs748202666, rs748206598, rs748211069, rs748213618, rs748214788, rs748218196, rs748221532, rs748223305, rs748224029, rs748226545, rs748230493, rs748247689, rs748251900, rs748253727, rs748257607, rs748257973, rs748267303, rs748274891, rs748281905, rs748282066, rs748283090, rs748288551, rs748297076, rs748303070, rs748303251, rs748304709, rs748307806, rs748328630, rs748329513, rs748331723, rs748335671, rs748343657, rs748346885, rs748350773, rs748355280, rs748356668, rs748370490, rs748377624, rs748382354, rs748385059, rs748394011, rs748395971, rs748409002, rs748418615, rs748423512, rs748424435, rs748427480, rs748436052, rs748442989, rs748443186, rs748452020, rs748453727, rs748470047, rs748473453, rs748480127, rs748481577, rs748491814, rs748497576, rs748505273, rs748515261, rs748518787, rs748541803, rs748542255, rs748544439, rs748546302, rs748556232, rs748557988, rs748561685, rs748565195, rs748565348, rs748579456, rs748582062, rs748582590, rs748587728, rs748588764, rs748601860, rs748610766, rs748611056, rs748617107, rs748622257, rs748624866, rs748640549, rs748647936, rs748648833, rs748650667, rs748652720, rs748655373, rs748666014, rs748684222, rs748684617, rs748688353, rs748691758, rs748694238, rs748698919, rs748699075, rs748700902, rs748702026, rs748705492, rs748705779, rs748712686, rs748713451, rs748717831, rs748724664, rs748725614, rs748730985, rs748731662, rs748732020, rs748733217, rs748733432, rs748735571, rs748736386, rs748737049, rs748743649, rs748744535, rs748759977, rs748765819, rs748779868, rs748786600, rs748789824, rs748794082, rs748799401, rs748801005, rs748802794, rs748806862, rs748816509, rs748820968, rs748823688, rs748827738, rs748832327, rs748832853, rs748835227, rs748843430, rs748860277, rs748862042, rs748868978, rs748871614, rs748877327, rs748877804, rs748879895, rs748882439, rs748883854, rs748919686, rs748922842, rs748926131, rs748926827, rs748927510, rs748927600, rs748927989, rs748947096, rs748953576, rs748973291, rs748981138, rs748984198, rs748988684, rs748989463, rs748991125, rs748992755, rs749008866, rs749009130, rs749009895, rs749011085, rs749014794, rs749016494, rs749016500, rs749018254, rs749029978, rs749030750, rs749034735, rs749040575, rs749043823, rs749045061, rs749049665, rs749065859, rs749072858, rs749073603, rs749079788, rs749080214, rs749080803, rs749081749, rs749087655, rs749088606, rs749101711, rs749107038, rs749111110, rs749117755, rs749118602, rs749119417, rs749120607, rs749120941, rs749125793, rs749127791, rs749128509, rs749131695, rs749144192, rs749147426, rs749158122, rs749160572, rs749169956, rs749171527, rs749173560, rs749194951, rs749197390, rs749202186, rs749208044, rs749209277, rs749209651, rs749221498, rs749223314, rs749224748, rs749231190, rs749233419, rs749251476, rs749261081, rs749261603, rs749263752, rs749270113, rs749270505, rs749270921, rs749274234, rs749274750, rs749276046, rs749296954, rs749299784, rs749300520, rs749301434, rs749304326, rs749312844, rs749315010, rs749323752, rs749325311, rs749333050, rs749335917, rs749338489, rs749340587, rs749353329, rs749356219, rs749362056, rs749372185, rs749379475, rs749382199, rs749386965, rs749396460, rs749399110, rs749403745, rs749422359, rs749423866, rs749426524, rs749436138, rs749436735, rs749442456, rs749447991, rs749454744, rs749455554, rs749458478, rs749468601, rs749476549, rs749478537, rs749485532, rs749491779, rs749491932, rs749496389, rs749496614, rs749496731, rs749502848, rs749510565, rs749511996, rs749519870, rs749522728, rs749525959, rs749528023, rs749532622, rs749533438, rs749534781, rs749548460, rs749551616, rs749553137, rs749555998, rs749566145, rs749568797, rs749570623, rs749575030, rs749577918, rs749585991, rs749590322, rs749595432, rs749600939, rs749605696, rs749605952, rs749607988, rs749612669, rs749614184, rs749614569, rs749615729, rs749620546, rs749620600, rs749625629, rs749628096, rs749644917, rs749645478, rs749653469, rs749662764, rs749664750, rs749664821, rs749665466, rs749669922, rs749673762, rs749675858, rs749678864, rs749694040, rs749700316, rs749742639, rs749753439, rs749753937, rs749757518, rs749759791, rs749763788, rs749767376, rs749785734, rs749789631, rs749790942, rs749794799, rs749798659, rs749800602, rs749801401, rs749804979, rs749818954, rs749821895, rs749822850, rs749823322, rs749830905, rs749831521, rs749837829, rs749839829, rs749848434, rs749849296, rs749850042, rs749851261, rs749851776, rs749858153, rs749860830, rs749875919, rs749883373, rs749889894, rs749892361, rs749900981, rs749901132, rs749902430, rs749904513, rs749907760, rs749907849, rs749910998, rs749913236, rs749915937, rs749916268, rs749929724, rs749931690, rs749937754, rs749939687, rs749941665, rs749950245, rs749950528, rs749968539, rs749981432, rs749990992, rs749993101, rs749993686, rs750007375, rs750008767, rs750013590, rs750017160, rs750025470, rs750028752, rs750030088, rs750031515, rs750032763, rs750037138, rs750038965, rs750040135, rs750047973, rs750050777, rs750054684, rs750057360, rs750073529, rs750073937, rs750075030, rs750076935, rs750077682, rs750089184, rs750095185, rs750102625, rs750102761, rs750108147, rs750116306, rs750117653, rs750123494, rs750127663, rs750128766, rs750131030, rs750135030, rs750135376, rs750137780, rs750139549, rs750145954, rs750153498, rs750159453, rs750181917, rs750182371, rs750213543, rs750216657, rs750216716, rs750218937, rs750220830, rs750221663, rs750223143, rs750226165, rs750245236, rs750245392, rs750245618, rs750264537, rs750268043, rs750270192, rs750278927, rs750280423, rs750282900, rs750283073, rs750304780, rs750310789, rs750316600, rs750323474, rs750325221, rs750325498, rs750329705, rs750333077, rs750342622, rs750344753, rs750352625, rs750353823, rs750359311, rs750360616, rs750364720, rs750364824, rs750365859, rs750370868, rs750379746, rs750384522, rs750414849, rs750414884, rs750418407, rs750421554, rs750422295, rs750425854, rs750425864, rs750447534, rs750450363, rs750450446, rs750453954, rs750455867, rs750462615, rs750464154, rs750464845, rs750466175, rs750468959, rs750477228, rs750480330, rs750482476, rs750487602, rs750488831, rs750498322, rs750515346, rs750519549, rs750526928, rs750528152, rs750530574, rs750533096, rs750534322, rs750536903, rs750540191, rs750541265, rs750542253, rs750548323, rs750549766, rs750563879, rs750567841, rs750578172, rs750579578, rs750582032, rs750585696, rs750594640, rs750599808, rs750601386, rs750605730, rs750614573, rs750614750, rs750621092, rs750625423, rs750626348, rs750626401, rs750637277, rs750646301, rs750647315, rs750655552, rs750655707, rs750662119, rs750670826, rs750695625, rs750695778, rs750696377, rs750697552, rs750698733, rs750701035, rs750701994, rs750703462, rs750705719, rs750707004, rs750707755, rs750716990, rs750730114, rs750730361, rs750731624, rs750733625, rs750737992, rs750748035, rs750754254, rs750758633, rs750762778, rs750770302, rs750771368, rs750772252, rs750774161, rs750774212, rs750777875, rs750778676, rs750785937, rs750789322, rs750792171, rs750792174, rs750795090, rs750795152, rs750803064, rs750811086, rs750812143, rs750816223, rs750816772, rs750819985, rs750825990, rs750832218, rs750848086, rs750854882, rs750865475, rs750866614, rs750868430, rs750869817, rs750873815, rs750876293, rs750878500, rs750880078, rs750897142, rs750897179, rs750904454, rs750913549, rs750914641, rs750918715, rs750922518, rs750931031, rs750931236, rs750933832, rs750935442, rs750939517, rs750943659, rs750946563, rs750952477, rs750956144, rs750957707, rs750957928, rs750964553, rs750971051, rs750977111, rs750977747, rs750983195, rs750993165, rs750999777, rs751005200, rs751019250, rs751029725, rs751030536, rs751037389, rs751041688, rs751044330, rs751044821, rs751046931, rs751047214, rs751048885, rs751049992, rs751052768, rs751053800, rs751055042, rs751058229, rs751062167, rs751084182, rs751088845, rs751095995, rs751098310, rs751105799, rs751107825, rs751108067, rs751111528, rs751113195, rs751119966, rs751120606, rs751122731, rs751123781, rs751124260, rs751127983, rs751131710, rs751136169, rs751139264, rs751140184, rs751146704, rs751152980, rs751153326, rs751161717, rs751166197, rs751166245, rs751169666, rs751171964, rs751174274, rs751174775, rs751188864, rs751189643, rs751190269, rs751192246, rs751193106, rs751193296, rs751199395, rs751209617, rs751216824, rs751242550, rs751243068, rs751245374, rs751250603, rs751251599, rs751256268, rs751258870, rs751259268, rs751262420, rs751265946, rs751266775, rs751267299, rs751271198, rs751282785, rs751288606, rs751297982, rs751299765, rs751302555, rs751302980, rs751303701, rs751311288, rs751322862, rs751327072, rs751331214, rs751335766, rs751340752, rs751343615, rs751346000, rs751350794, rs751359270, rs751359354, rs751359362, rs751367585, rs751369383, rs751373512, rs751380933, rs751381318, rs751390863, rs751392699, rs751414705, rs751416106, rs751423658, rs751438129, rs751438975, rs751440460, rs751442436, rs751454230, rs751454301, rs751461094, rs751462366, rs751471298, rs751481825, rs751486433, rs751495067, rs751499703, rs751503774, rs751504542, rs751507809, rs751515837, rs751520961, rs751526876, rs751528737, rs751530809, rs751532245, rs751539960, rs751547531, rs751554764, rs751556502, rs751557465, rs751560261, rs751564334, rs751581425, rs751584665, rs751592105, rs751594607, rs751598625, rs751600405, rs751601970, rs751603404, rs751607513, rs751608288, rs751611511, rs751613460, rs751622791, rs751622997, rs751624462, rs751627052, rs751631462, rs751654382, rs751655105, rs751658213, rs751672101, rs751673057, rs751676131, rs751680077, rs751682186, rs751686766, rs751689880, rs751693770, rs751697419, rs751699976, rs751718597, rs751720164, rs751722553, rs751725706, rs751733877, rs751738560, rs751747509, rs751750718, rs751758230, rs751765780, rs751768165, rs751768492, rs751772886, rs751773196, rs751778882, rs751784049, rs751788974, rs751798041, rs751799153, rs751805901, rs751809114, rs751812177, rs751819243, rs751822157, rs751828802, rs751830847, rs751832504, rs751837300, rs751846212, rs751849780, rs751850345, rs751853788, rs751856350, rs751857098, rs751858884, rs751860627, rs751864571, rs751864659, rs751873431, rs751876150, rs751878801, rs751887400, rs751900576, rs751909736, rs751911257, rs751915332, rs751915649, rs751920419, rs751925172, rs751930437, rs751934873, rs751938856, rs751940747, rs751942662, rs751942680, rs751944322, rs751945552, rs751952459, rs751959020, rs751966657, rs752074550, rs752075358, rs752079539, rs752079614, rs752080213, rs752081145, rs752088062, rs752090608, rs752092413, rs752092558, rs752094219, rs752103756, rs752108685, rs752110471, rs752121048, rs752127807, rs752128135, rs752129576, rs752131165, rs752132049, rs752139353, rs752142118, rs752149272, rs752161887, rs752165636, rs752166522, rs752168985, rs752169509, rs752172176, rs752172585, rs752180119, rs752183158, rs752061228, rs752058840, rs752055610, rs752053464, rs752049975, rs752044512, rs752036076, rs752035109, rs752034225, rs752031663, rs752023164, rs752020980, rs752019455, rs752016075, rs752015121, rs752003417, rs752002660, rs751999850, rs751997279, rs751993443, rs751991807, rs751984572, rs751983542, rs751983248, rs751971688, rs751968849, rs751967876, rs751967458, rs752183777, rs752184297, rs752188329, rs752189747, rs752191909, rs752192874, rs752199562, rs752223606, rs752238203, rs752238889, rs752244561, rs752245063, rs752246229, rs752249871, rs752250631, rs752257897, rs752265077, rs752268433, rs752283072, rs752285724, rs752295030, rs752297189, rs752305012, rs752306596, rs752309873, rs752310199, rs752311056, rs752322528, rs752322682, rs752326413, rs752328264, rs752334946, rs752336602, rs752340803, rs752346896, rs752354758, rs752355646, rs752356162, rs752357900, rs752370752, rs752371766, rs752375215, rs752389439, rs752395921, rs752397032, rs752397992, rs752398671, rs752400396, rs752400494, rs752400934, rs752401682, rs752417497, rs752424736, rs752427126, rs752427803, rs752429064, rs752436756, rs752438962, rs752446387, rs752451693, rs752452907, rs752454289, rs752467186, rs753984903, rs753982669, rs753981845, rs753974623, rs753969441, rs753966648, rs753963740, rs753957072, rs753956699, rs753956249, rs753954438, rs753953549, rs753951351, rs753948388, rs753003383, rs752994565, rs752992990, rs752991367, rs752985829, rs752981738, rs752981221, rs752978194, rs752976117, rs752648056, rs752642915, rs752637212, rs752637111, rs752636457, rs752632649, rs752631666, rs752630121, rs752628107, rs752622821, rs752603890, rs752591028, rs752586178, rs752581596, rs752576280, rs752575481, rs752575103, rs752574416, rs752569672, rs752566889, rs752564217, rs752557899, rs752546705, rs752539799, rs752526914, rs752525338, rs752518606, rs752517553, rs752516046, rs752512079, rs752507340, rs752500537, rs752497536, rs752489693, rs752488072, rs752485547, rs752482358, rs752481020, rs752471289, rs754250413, rs754227523, rs754226206, rs754217109, rs754216711, rs754212410, rs754206876, rs754204307, rs754202140, rs754200396, rs754198210, rs754186150, rs754183138, rs754182409, rs754176458, rs754173965, rs754173346, rs754167903, rs754163400, rs754158802, rs754139358, rs754136344, rs754135847, rs754135319, rs754134971, rs754132516, rs754132357, rs754131709, rs754126279, rs754122405, rs754121247, rs754118268, rs754116611, rs754111191, rs754097921, rs754097068, rs754089711, rs754086380, rs754084177, rs754081376, rs754078283, rs754075438, rs754075009, rs754073591, rs754070805, rs754067359, rs754066587, rs754062593, rs754057403, rs754048853, rs754046109, rs754041989, rs754039536, rs754032908, rs754028931, rs754817368, rs754817555, rs754822539, rs754829872, rs754830311, rs754830528, rs754842981, rs754843314, rs754844856, rs754028054, rs754008591, rs753999155, rs753992589, rs753985293, rs754252515, rs754253751, rs754255802, rs754256064, rs754256231, rs754270315, rs754274677, rs754281894, rs754289936, rs754292437, rs754297147, rs754303810, rs754313393, rs754317320, rs753946961, rs753940933, rs753938560, rs753930125, rs753924399, rs753922840, rs753901759, rs753890194, rs753886576, rs753886549, rs753880698, rs753872100, rs753871406, rs753863679, rs753856145, rs753853068, rs753850208, rs753836291, rs753835841, rs753813649, rs753809778, rs753809085, rs753808333, rs753801178, rs753800266, rs753799900, rs753796081, rs753794545, rs753791486, rs753789998, rs753780943, rs753778098, rs753770279, rs753764361, rs753760520, rs753738572, rs753735994, rs753731913, rs753728918, rs753723041, rs753722314, rs753716890, rs753715645, rs753714249, rs753708601, rs753708491, rs753706150, rs753703160, rs753698138, rs753695801, rs753690178, rs753682342, rs753665769, rs753664984, rs753657049, rs753656328, rs753650502, rs753650406, rs753647887, rs753635528, rs753622283, rs753620293, rs753608193, rs753590208, rs753589182, rs753584996, rs753579891, rs753579178, rs753577840, rs753574786, rs753573375, rs753566337, rs753564574, rs753562327, rs753553579, rs753546521, rs753542776, rs753537722, rs753534280, rs753529568, rs753529092, rs753519539, rs753510901, rs753509091, rs753507981, rs753504047, rs753498709, rs753497467, rs753486251, rs753480807, rs753480377, rs753475289, rs753472234, rs753472202, rs753469543, rs753468599, rs753464516, rs753448612, rs753444959, rs753442501, rs753437155, rs753421317, rs753417521, rs753414111, rs753412412, rs753407577, rs753407457, rs753405790, rs753399797, rs753397853, rs753395557, rs755417037, rs755419495, rs755439326, rs755461457, rs755467355, rs755480007, rs755485519, rs755485562, rs755502585, rs755510041, rs753391004, rs753389904, rs753388672, rs753387511, rs753386066, rs753384371, rs753382270, rs753376330, rs753374891, rs753372811, rs753359189, rs753334093, rs753332957, rs753322975, rs753322608, rs753320706, rs753317042, rs753310610, rs753308358, rs753297909, rs753286906, rs753283130, rs753282909, rs753268110, rs753262752, rs753261217, rs753257105, rs753250242, rs753249951, rs753247722, rs753247014, rs753241640, rs753232836, rs753230766, rs753228224, rs753226098, rs753225553, rs753218855, rs753218517, rs753210776, rs753209450, rs753203590, rs753190681, rs753189359, rs753186560, rs753183779, rs753183023, rs753182013, rs753178876, rs753172637, rs753170704, rs753165078, rs753160723, rs753158858, rs753151795, rs753149303, rs753149298, rs753143335, rs753140035, rs753138352, rs753138216, rs753127023, rs753114124, rs753103110, rs753097067, rs753096076, rs753084716, rs753080633, rs753073260, rs753073085, rs753070891, rs753068195, rs753047921, rs753044162, rs753020195, rs753014644, rs753011713, rs753009207, rs753005556, rs753005492, rs753004302, rs754331141, rs754331488, rs754336729, rs754342039, rs754342114, rs754343022, rs754360372, rs754363174, rs754370448, rs752965964, rs752965703, rs752965677, rs752965024, rs752960579, rs752953942, rs752945293, rs752945185, rs752944423, rs752941905, rs752936924, rs752934825, rs752924871, rs752918978, rs752914169, rs752911604, rs752901464, rs752898657, rs752897086, rs752891218, rs752889517, rs752885988, rs752878511, rs752869093, rs752863638, rs752861805, rs752859686, rs752859540, rs752858568, rs752858193, rs752854448, rs752849552, rs752845230, rs752843233, rs752840367, rs752827991, rs752826027, rs752823624, rs752823450, rs752819869, rs752813551, rs752812435, rs752807903, rs752806166, rs752804650, rs752803709, rs752802823, rs752801133, rs752785570, rs752781512, rs752774480, rs752765024, rs752764976, rs752763391, rs752761643, rs752755413, rs752746720, rs752744103, rs752743803, rs752737758, rs752736343, rs752729128, rs752725475, rs752721161, rs752721023, rs752719796, rs752710766, rs752703318, rs752700977, rs752698148, rs752697557, rs752696340, rs752695639, rs752687991, rs752683043, rs752676686, rs752668809, rs752666527, rs752663984, rs752658943, rs752657884, rs752656290, rs752654972, rs752654842, rs752651872, rs752650421, rs754373202, rs754373965, rs754376754, rs754379787, rs754381347, rs754383009, rs754383684, rs754384622, rs754399459, rs754402977, rs754404783, rs754414461, rs754416991, rs754417836, rs754421021, rs754426125, rs754433203, rs754433515, rs754433577, rs754436926, rs754556079, rs756421894, rs756424571, rs756430774, rs756443881, rs754558913, rs754563025, rs754565139, rs754575215, rs754579449, rs754583178, rs754584838, rs754586342, rs754589252, rs754596389, rs754599498, rs754600708, rs754601411, rs754604600, rs754605115, rs754609746, rs754617376, rs754621914, rs754625028, rs754627719, rs754665477, rs754678088, rs754683269, rs754683749, rs754691493, rs754694262, rs754700198, rs754704844, rs754705406, rs754706305, rs754714449, rs754717697, rs754721501, rs754727815, rs754728051, rs754729223, rs754729706, rs754735479, rs754736471, rs754737537, rs754737857, rs754738290, rs754743091, rs754743848, rs754749919, rs754762088, rs754767455, rs754778565, rs754780530, rs754789703, rs754790524, rs754797379, rs754813930, rs754850670, rs754851966, rs754852588, rs754853679, rs754855670, rs754860564, rs754865488, rs754865637, rs754867374, rs754872703, rs754882499, rs754890667, rs754895205, rs754897663, rs754897904, rs754902994, rs754904553, rs754907264, rs754909458, rs754914114, rs754914777, rs754920448, rs754921316, rs754926702, rs754928454, rs754935347, rs754936108, rs754936251, rs754937015, rs754937901, rs754938833, rs755063944, rs755065538, rs755072586, rs755096239, rs755100995, rs755102581, rs755109992, rs755123240, rs755125517, rs755128364, rs755129167, rs755130255, rs755142585, rs755144975, rs755151577, rs755152797, rs755158574, rs755158645, rs755168390, rs755168448, rs755171401, rs755178842, rs755181804, rs755182290, rs755188940, rs755190831, rs755194218, rs755196295, rs755204769, rs755215751, rs755222188, rs755224062, rs755225838, rs755226064, rs755233980, rs755241669, rs755243228, rs755250813, rs755253268, rs755257380, rs755258786, rs755260395, rs755262426, rs755263152, rs755272331, rs755277349, rs755277368, rs755288747, rs757132806, rs757135725, rs757142797, rs757143094, rs757148888, rs757155308, rs757160657, rs757161900, rs755293833, rs755296916, rs755302646, rs755304201, rs755305848, rs755307184, rs755313913, rs755315841, rs755318519, rs755327594, rs755333810, rs755336616, rs755346072, rs755357857, rs755363872, rs755373290, rs755374665, rs755379498, rs755395391, rs755399391, rs755403898, rs755405308, rs755411945, rs755412882, rs755413856, rs755515196, rs755524353, rs755527183, rs755528011, rs755530879, rs755536088, rs755536285, rs755557843, rs755563182, rs755569689, rs755578969, rs755580236, rs755580272, rs755581747, rs755582689, rs755583751, rs755583760, rs755584324, rs755585124, rs755589751, rs755601757, rs755608207, rs755615079, rs755615151, rs755617307, rs755622322, rs755623857, rs755641700, rs755643402, rs755646653, rs755653250, rs755657782, rs755660270, rs755673327, rs755675807, rs755684519, rs755689466, rs755691706, rs755698901, rs755699014, rs755704045, rs755704719, rs755708949, rs755730974, rs755735740, rs755737792, rs755738287, rs755746372, rs755748167, rs755749239, rs755754646, rs755768658, rs755771616, rs755778679, rs755781101, rs755781342, rs755799765, rs755804283, rs755805262, rs755811571, rs755819650, rs755820217, rs755821302, rs755826294, rs755826684, rs755834994, rs755837887, rs755840205, rs755842603, rs755851197, rs755857663, rs755857755, rs755860902, rs755865592, rs755869696, rs755884124, rs755895074, rs755895295, rs755895702, rs755905411, rs755909723, rs755918996, rs755924221, rs755924290, rs755928919, rs755929545, rs755932108, rs755939871, rs755946129, rs755947984, rs755949988, rs755952041, rs755956143, rs755957507, rs755969102, rs755974961, rs755976761, rs755981806, rs755992341, rs755995118, rs755995449, rs756006416, rs756012780, rs756018493, rs756020448, rs756024063, rs756026773, rs756036553, rs756037260, rs756041764, rs756043360, rs756045943, rs756047597, rs756048573, rs756049716, rs756060902, rs756061859, rs756065241, rs756066851, rs756077179, rs756079394, rs756086896, rs756092026, rs756116188, rs756124805, rs756130138, rs756131313, rs756131584, rs756132239, rs756132320, rs756134495, rs756139492, rs756148401, rs756148690, rs756152987, rs756159043, rs756162782, rs756167092, rs756167372, rs756169750, rs756171464, rs756173043, rs756180077, rs756187561, rs756191610, rs756193933, rs756194885, rs756204312, rs756205709, rs756208214, rs756218440, rs756218842, rs756221085, rs756221920, rs756222565, rs756224591, rs756227852, rs756230102, rs756236253, rs756239416, rs756250794, rs756253616, rs756258658, rs756259317, rs756259783, rs756260876, rs756282288, rs756287819, rs756291531, rs756306570, rs756309319, rs756313687, rs756324210, rs756328414, rs756332731, rs756332866, rs756336208, rs756340713, rs754440080, rs754442262, rs754445352, rs754445702, rs754454268, rs754462571, rs754471909, rs754472779, rs754476484, rs754477188, rs754478495, rs754496465, rs754497092, rs754501586, rs754504935, rs754506186, rs754518146, rs754539340, rs754553587, rs756457717, rs756458154, rs758165690, rs758168497, rs756458915, rs756462818, rs756475916, rs756482856, rs756483380, rs756497185, rs756499001, rs756503815, rs756510181, rs756511326, rs756519792, rs756519985, rs756520951, rs756550996, rs756551040, rs756552659, rs756555344, rs756560160, rs756567155, rs756571072, rs756574339, rs756574809, rs756586424, rs756588606, rs756599307, rs756602835, rs756611166, rs756614357, rs756615541, rs756615608, rs756622196, rs756623401, rs756628151, rs756632231, rs756653673, rs756664176, rs756668084, rs756668459, rs756669467, rs756675927, rs756682556, rs756683024, rs756688567, rs756693015, rs756786427, rs756788810, rs756791066, rs756793876, rs756796284, rs756797602, rs756801856, rs756805373, rs756826906, rs756834299, rs756835582, rs756839949, rs756849872, rs756850117, rs756851361, rs756854513, rs756856871, rs756860283, rs756868053, rs756871554, rs756871679, rs754955544, rs754957026, rs754961325, rs754984863, rs754986659, rs754993020, rs754994339, rs754998274, rs755001941, rs755004472, rs755011936, rs755013891, rs755016267, rs755016373, rs755017704, rs755018205, rs755024239, rs755025902, rs755042075, rs755042874, rs755047385, rs755048019, rs755054467, rs755057280, rs755061073, rs755061315, rs756880963, rs756883648, rs756891896, rs756896951, rs756901132, rs756901611, rs756902635, rs756908625, rs756908964, rs756912186, rs756927166, rs756934048, rs756955116, rs756976076, rs756980390, rs756985045, rs756987070, rs756990103, rs756991179, rs756993844, rs756997119, rs757005464, rs757009658, rs757011662, rs757016032, rs757019017, rs757022215, rs757027711, rs757030627, rs757032760, rs757039606, rs757043373, rs757047313, rs757048028, rs757060726, rs757061754, rs757069748, rs757071781, rs757073550, rs757077922, rs757084240, rs757092644, rs757093894, rs757100393, rs757100508, rs757108444, rs757119906, rs757164022, rs757169052, rs757170799, rs757178227, rs757178675, rs757187555, rs757188381, rs757197871, rs757198028, rs757198042, rs757200037, rs757206038, rs757215894, rs757226990, rs757229417, rs757240855, rs757241458, rs757248849, rs757251290, rs757262135, rs757262382, rs757268249, rs757276915, rs757278601, rs757280172, rs757285664, rs757287367, rs757298543, rs757303194, rs757304589, rs757305542, rs757314643, rs757315157, rs757316934, rs757328723, rs757331897, rs757332231, rs757334835, rs757336131, rs757337250, rs757339606, rs757340159, rs757341158, rs757343868, rs757350424, rs757354149, rs757364330, rs757369027, rs757375720, rs757378227, rs757378423, rs757379523, rs757385043, rs757387694, rs757388541, rs757391076, rs757392235, rs757404008, rs757404275, rs757409102, rs757415566, rs757426673, rs757428475, rs757435241, rs757439323, rs757446824, rs757456351, rs757459504, rs757461750, rs757462150, rs757467683, rs757470936, rs757474311, rs757479103, rs757479941, rs757512421, rs757523958, rs757529181, rs757542037, rs757553055, rs757562721, rs757568190, rs757570284, rs757577483, rs757578940, rs757582249, rs757584323, rs757586235, rs757589246, rs757592181, rs757593445, rs757598659, rs757604201, rs757607312, rs757609583, rs757612956, rs757615300, rs757616171, rs757624702, rs757626938, rs757627169, rs759246756, rs759248002, rs759255960, rs757630348, rs757635528, rs757636989, rs757639497, rs757641678, rs757645847, rs757654825, rs757655830, rs757658225, rs757661749, rs757663388, rs757673655, rs757696437, rs757704014, rs757709716, rs757710718, rs757714233, rs757715070, rs757715273, rs757717340, rs757725635, rs757728522, rs757740859, rs757749747, rs757751002, rs757751668, rs757751908, rs757753192, rs757755879, rs757757006, rs757761940, rs757762741, rs757763024, rs757766317, rs757767510, rs757767894, rs757768013, rs757778079, rs757779334, rs757781877, rs757782103, rs757785686, rs757789117, rs757794804, rs757796698, rs757801622, rs757802280, rs757803124, rs757804506, rs757804708, rs757805311, rs757809814, rs757811913, rs757817669, rs757823011, rs757829100, rs757833512, rs757836521, rs757855768, rs757858928, rs757861030, rs757867264, rs757868595, rs757878910, rs757884953, rs757884993, rs757886829, rs757889915, rs757891186, rs757897508, rs757919300, rs757931257, rs757937666, rs757946319, rs757953108, rs757954542, rs757955954, rs757956331, rs757958616, rs757966248, rs757967050, rs757979760, rs757992130, rs758002908, rs758005823, rs758010644, rs758016101, rs758017894, rs758019440, rs758020656, rs758031263, rs758033168, rs758036593, rs758046604, rs758047821, rs758048477, rs758048573, rs758048596, rs758068013, rs758073495, rs758081080, rs758084422, rs758085333, rs756343242, rs756344367, rs756350009, rs756351474, rs756351572, rs756357666, rs756359187, rs756365906, rs756372926, rs756374011, rs756379808, rs756382337, rs756397123, rs756400643, rs756408950, rs756409751, rs756413080, rs756417904, rs756419482, rs758164401, rs759812348, rs759817968, rs759819738, rs759821330, rs759822610, rs759833559, rs759837090, rs759842632, rs759852083, rs759860830, rs759862054, rs759866288, rs759868204, rs759871578, rs759872452, rs758177253, rs758184679, rs758188563, rs758193509, rs758208226, rs758209480, rs758211853, rs758221082, rs758226356, rs758226916, rs758228291, rs758233701, rs758245488, rs758252274, rs758257385, rs758263007, rs758272162, rs758279139, rs758281496, rs758285861, rs758292146, rs758294171, rs758299263, rs758299801, rs758299856, rs758319806, rs758321892, rs758323042, rs758330166, rs758330886, rs758333844, rs758335956, rs758337531, rs758340028, rs758347603, rs758348764, rs758353881, rs758356842, rs758363893, rs758364444, rs758377511, rs758378816, rs758381704, rs758383476, rs758386554, rs756699354, rs756699622, rs756700950, rs756707471, rs756711072, rs756721259, rs756726014, rs756726323, rs756735528, rs756736967, rs756742953, rs756748872, rs756761212, rs756761726, rs756770598, rs756774214, rs756775580, rs756785259, rs758397939, rs758406484, rs758409490, rs758410015, rs758410283, rs758410559, rs758415268, rs758416785, rs758417329, rs758433204, rs758435705, rs758436223, rs758446302, rs758449690, rs758449915, rs758456697, rs758457864, rs758460165, rs758464965, rs758470079, rs758474481, rs758474542, rs758481197, rs758481785, rs758495000, rs758502028, rs758502155, rs758508347, rs758511547, rs758516918, rs758519410, rs758531620, rs758536002, rs758546154, rs758551473, rs758558222, rs758564190, rs758566928, rs758568544, rs758571738, rs758572261, rs758579856, rs758586745, rs758589277, rs758594299, rs758598070, rs758599450, rs758602244, rs758612849, rs758613047, rs758616365, rs758616586, rs758618864, rs758625274, rs758630620, rs758632620, rs758634483, rs758636545, rs758637430, rs758648046, rs758649538, rs758653065, rs758664773, rs758666669, rs758670639, rs758672027, rs758672971, rs758681603, rs758682648, rs758688578, rs758691058, rs758692038, rs758692228, rs758694919, rs758703580, rs758705143, rs758706170, rs758713214, rs758714665, rs758714933, rs758718829, rs758722510, rs758723110, rs758725194, rs758727632, rs758730539, rs758740309, rs758743447, rs758746882, rs758754054, rs758766668, rs758775001, rs758777343, rs758781483, rs758783957, rs758784575, rs758788626, rs758789851, rs758791184, rs758824138, rs758825933, rs758831653, rs758834462, rs758845985, rs758846662, rs758852831, rs758861923, rs758868458, rs758884129, rs758886199, rs758887080, rs758890168, rs758899822, rs758907612, rs758909470, rs758910259, rs758917627, rs758918390, rs758920495, rs758922405, rs758930474, rs758936473, rs758950006, rs758953990, rs758954806, rs758957218, rs758968494, rs758976204, rs758980870, rs758983922, rs758988133, rs758991095, rs758996277, rs759004183, rs759005230, rs759011007, rs759011743, rs759019224, rs759021387, rs759023001, rs759028462, rs759035159, rs759035344, rs759036174, rs759038498, rs759047978, rs759055212, rs759055347, rs759058070, rs759061733, rs759066718, rs759068246, rs759082027, rs759082338, rs759087258, rs759088787, rs759091440, rs759093266, rs759093434, rs759098766, rs759103763, rs759109322, rs759113246, rs759120646, rs759121484, rs759127436, rs759127969, rs759134786, rs759139311, rs759144210, rs759146485, rs759152164, rs759155854, rs759160539, rs759161821, rs759162171, rs759164343, rs759166217, rs759167146, rs759170599, rs759181393, rs759186554, rs759193750, rs759198024, rs759198370, rs759204513, rs759204911, rs759208547, rs759222282, rs759226106, rs759227255, rs759229520, rs759233293, rs759239876, rs759258430, rs759258819, rs759270247, rs759277676, rs759281882, rs759283737, rs759285516, rs759293548, rs759308090, rs759312395, rs759319142, rs759321435, rs759330297, rs759330314, rs759334334, rs759342044, rs759348015, rs759349953, rs759350875, rs759352415, rs759353718, rs759355376, rs759365737, rs759365767, rs759368746, rs759383920, rs759386336, rs759392254, rs759516529, rs759516711, rs759517106, rs759520507, rs759552230, rs759555791, rs759557413, rs759568407, rs759568894, rs759577360, rs759579124, rs759584828, rs759585544, rs759585818, rs759594353, rs759596138, rs759605271, rs759608022, rs759610418, rs759613740, rs759614091, rs759624628, rs759625530, rs759625715, rs759639191, rs759646398, rs759656825, rs759657950, rs758085712, rs758090120, rs758090620, rs758098650, rs758100972, rs758103924, rs758109728, rs758118169, rs761488754, rs761490347, rs761500524, rs761502397, rs761512731, rs761521763, rs761524420, rs761539740, rs758120956, rs758122047, rs758123014, rs758125501, rs758133920, rs758134646, rs758134778, rs758136683, rs758146520, rs758160481, rs758162488, rs759881215, rs761609936, rs761615150, rs761616989, rs761630129, rs761632827, rs761641022, rs761645207, rs759888400, rs759889256, rs759892081, rs759894638, rs759897743, rs759898103, rs759912919, rs759913567, rs759914093, rs759915029, rs759916194, rs759925238, rs759927792, rs759929760, rs759943265, rs759944676, rs759946630, rs759949801, rs759955280, rs759964325, rs759971364, rs759972975, rs759973830, rs759977095, rs759980272, rs759980378, rs759982585, rs759988446, rs760001608, rs760002676, rs760007927, rs760008499, rs760010968, rs760013637, rs760014848, rs760016642, rs760024576, rs760028210, rs760029664, rs760033870, rs760034400, rs760044922, rs760044999, rs760046644, rs760046826, rs760049609, rs760051233, rs760053700, rs760057820, rs760064633, rs760065318, rs760066240, rs760072728, rs760091413, rs760094892, rs760095810, rs760097856, rs760101996, rs760103973, rs760108130, rs760109774, rs760122211, rs760125478, rs760128014, rs760128108, rs760133406, rs760134421, rs760136281, rs760137770, rs760139495, rs760140814, rs760145957, rs760147262, rs760157054, rs760159874, rs760169730, rs760174861, rs760181423, rs760181579, rs760185890, rs760187725, rs760189199, rs760196408, rs760202090, rs760205548, rs760208542, rs760219197, rs760221384, rs760227054, rs760228077, rs760229593, rs760231536, rs760234395, rs760277677, rs760284053, rs760287357, rs760292213, rs760297582, rs760302604, rs760306868, rs760309960, rs760311556, rs760319093, rs760324332, rs760336668, rs760338218, rs760346886, rs760347769, rs760356977, rs760362500, rs760366191, rs760368292, rs760368831, rs760377923, rs760399320, rs760400514, rs760406021, rs760406879, rs760410395, rs760413632, rs760416872, rs760417376, rs760420720, rs760429524, rs760431238, rs760432971, rs760434573, rs760436947, rs760441557, rs760451806, rs760466683, rs760467263, rs760468455, rs760469027, rs760470664, rs760489457, rs760497385, rs760499826, rs760500720, rs760515359, rs760524474, rs760534892, rs760536450, rs760540230, rs760541670, rs760542183, rs760545004, rs760547748, rs760548329, rs760552555, rs760558443, rs760558516, rs760558789, rs760562159, rs760563175, rs760569824, rs760570037, rs760572086, rs760572126, rs760584945, rs760589715, rs760596560, rs760602693, rs760620833, rs760632178, rs760634116, rs760636798, rs760637174, rs760649141, rs760654030, rs760655865, rs760657456, rs760659941, rs760689070, rs760691343, rs760695521, rs760699911, rs760701341, rs760703409, rs760708721, rs760710188, rs760716086, rs760727420, rs760733211, rs760744386, rs760746025, rs760751726, rs760753481, rs760753737, rs760761482, rs760770322, rs760785748, rs760792397, rs760805453, rs760814068, rs760815616, rs760821754, rs760823321, rs760829897, rs760835440, rs760837109, rs760843515, rs760849530, rs760857236, rs760859053, rs760859424, rs760861889, rs760866095, rs760875329, rs760879018, rs760882021, rs760885653, rs760890886, rs760892367, rs760907858, rs760929849, rs760931060, rs760935151, rs760940438, rs760949404, rs760953000, rs760956814, rs760973796, rs760978106, rs760984320, rs760985892, rs760986878, rs760988266, rs760989104, rs761153609, rs761176559, rs761177439, rs761184090, rs761194864, rs761195264, rs761202085, rs761204121, rs761205193, rs761205742, rs761215593, rs761218270, rs761229331, rs761235159, rs761246133, rs761246933, rs761249176, rs761259848, rs761261979, rs761266870, rs761267168, rs762916346, rs762919314, rs762919751, rs762921937, rs762923045, rs762924143, rs762925197, rs762936162, rs762939162, rs762939913, rs761267338, rs761273104, rs761278351, rs761283808, rs761284273, rs761287964, rs761289060, rs761291423, rs761308315, rs761308611, rs761316963, rs761324306, rs761329352, rs759392705, rs759393997, rs759396238, rs759407282, rs759424807, rs759429182, rs759437108, rs759438851, rs759439358, rs759441113, rs759442502, rs759448661, rs759455692, rs759455972, rs759458419, rs759463827, rs759464178, rs759472438, rs759476469, rs759477349, rs759482180, rs759482499, rs759483975, rs759487975, rs759489267, rs759492212, rs759495066, rs759495491, rs759495906, rs759498672, rs759499167, rs759503040, rs759512211, rs759512555, rs761330041, rs761337026, rs761341280, rs761351424, rs761353189, rs761361741, rs761361954, rs761365739, rs761367028, rs761375511, rs761382972, rs761393369, rs761395746, rs761401856, rs761403544, rs761406572, rs761410742, rs761414005, rs761415396, rs761420475, rs761421014, rs761423180, rs761441295, rs761443309, rs761450953, rs761456598, rs761467538, rs761472320, rs759659814, rs759665392, rs759667823, rs759670839, rs759670924, rs759672711, rs759680634, rs759681958, rs759682516, rs759689281, rs759690353, rs759690750, rs759697731, rs759704020, rs759705276, rs759708131, rs759727498, rs759727891, rs759730424, rs759733401, rs759733402, rs759749717, rs759754686, rs759759768, rs759762587, rs759769402, rs759771524, rs759780379, rs759786136, rs759791539, rs759794360, rs759806308, rs759811992, rs761473312, rs761473845, rs761475371, rs761476132, rs761481768, rs761482284, rs761482817, rs761647160, rs763509861, rs763510613, rs763514322, rs763529161, rs763533627, rs763545913, rs763548242, rs761647928, rs761652645, rs761660754, rs761668744, rs761679711, rs761680777, rs761686259, rs761690449, rs761696670, rs761697920, rs761704073, rs761708482, rs761710123, rs761712194, rs761714626, rs761714859, rs761719956, rs761723375, rs761733352, rs761736937, rs761749048, rs761750198, rs761754254, rs761756877, rs761768609, rs761770670, rs761773215, rs761777520, rs761780740, rs761794077, rs761800813, rs761814647, rs761815239, rs761821445, rs761823344, rs761830230, rs761849010, rs761852215, rs761852381, rs761857361, rs761864821, rs761866721, rs761867301, rs761870786, rs761872973, rs761879026, rs761883209, rs761884164, rs761884718, rs761885672, rs761886357, rs761896371, rs761903762, rs761910822, rs761915342, rs761915965, rs761926047, rs761933500, rs761939534, rs761962244, rs761963431, rs761965710, rs761969972, rs761972826, rs761975876, rs761979217, rs761994412, rs761999449, rs761999739, rs762000248, rs762007969, rs762012167, rs762022296, rs762027620, rs762027671, rs762028199, rs762028556, rs762033508, rs762036835, rs762045438, rs762049422, rs762054276, rs762056074, rs762065775, rs762068658, rs762082893, rs762093590, rs762100936, rs762102801, rs762104752, rs762117483, rs762128207, rs762129397, rs762129616, rs762130375, rs762137559, rs762142312, rs762146179, rs762149438, rs762150596, rs762152082, rs762161443, rs762165423, rs762176706, rs762188078, rs762203746, rs762205075, rs762208417, rs762217455, rs762223796, rs762226783, rs762229285, rs762230387, rs762233702, rs762243808, rs762249279, rs762252517, rs762260417, rs762264559, rs762269074, rs762270413, rs762272249, rs762272518, rs762275961, rs762277692, rs762279924, rs762279969, rs762284420, rs762294116, rs762296259, rs762309691, rs762322141, rs762330159, rs762342110, rs762347267, rs762354749, rs762360002, rs762360916, rs762369550, rs762370685, rs762378728, rs762382425, rs762382955, rs762385070, rs762391267, rs762394617, rs762395836, rs762399629, rs762406072, rs762408081, rs762409442, rs762422733, rs762430810, rs762431374, rs762434314, rs762444710, rs762450961, rs762456518, rs762456991, rs762458854, rs762460904, rs762465367, rs762465405, rs762465500, rs762472683, rs762480870, rs762485446, rs762491173, rs762503357, rs762508852, rs762515285, rs762518832, rs762524541, rs762524838, rs762526548, rs762534053, rs762538361, rs762543882, rs762551068, rs762553196, rs760990232, rs760992874, rs760993235, rs760997043, rs761003575, rs761016775, rs761024394, rs761027625, rs761028725, rs761060609, rs761068096, rs761075694, rs761103954, rs761104753, rs761116044, rs761120240, rs761120458, rs761136617, rs761139305, rs761139735, rs761146486, rs761152020, rs762834989, rs762835861, rs762846786, rs762849577, rs762851183, rs762858697, rs762859938, rs762860343, rs762862829, rs762868463, rs762871876, rs762874767, rs762878191, rs762890758, rs762907710, rs762910414, rs762910447, rs762910627, rs762945264, rs762947334, rs762955253, rs762957443, rs762960711, rs762963367, rs762966634, rs762969289, rs762989308, rs762994158, rs762999501, rs763003179, rs763004038, rs763006894, rs763007445, rs763010834, rs763032199, rs763034923, rs763036473, rs763038497, rs763045817, rs763052824, rs763053961, rs763069365, rs763073157, rs763081181, rs763094553, rs763095158, rs763095323, rs763098884, rs763108643, rs763122832, rs763124931, rs763125533, rs763128658, rs763134375, rs763136512, rs763158155, rs763164934, rs763164979, rs763166466, rs763174849, rs763182744, rs763188330, rs763192183, rs763206503, rs763206943, rs763222534, rs763226508, rs763226970, rs763227287, rs763236434, rs763237131, rs763238031, rs763246640, rs763247322, rs763250988, rs763250991, rs763251395, rs763254057, rs763259978, rs763260041, rs763276884, rs763279259, rs763283583, rs763283630, rs763286705, rs763290063, rs763318075, rs763325717, rs763332980, rs763338640, rs763338822, rs763341602, rs763342231, rs763347414, rs763351685, rs763364400, rs763369253, rs763379961, rs763380152, rs763384380, rs763405029, rs763409332, rs763410003, rs763410146, rs763412190, rs763419591, rs763420495, rs763421751, rs761548240, rs761549107, rs761554403, rs761557577, rs761569420, rs761573545, rs761574172, rs761580813, rs761587024, rs761599247, rs761602713, rs761607679, rs763552119, rs765117177, rs765117994, rs765122180, rs763581536, rs763582106, rs763582509, rs763582761, rs763589558, rs763591254, rs763604925, rs763608605, rs763619090, rs763621564, rs763626467, rs763627105, rs763632440, rs763649688, rs763651012, rs763666294, rs763666490, rs763679777, rs763691935, rs763694058, rs763695901, rs763706210, rs763708752, rs763708849, rs763713872, rs763732088, rs763737928, rs763748327, rs763749104, rs763759151, rs763787671, rs763788699, rs763789951, rs763792139, rs763806619, rs763813951, rs763820001, rs763825860, rs763829690, rs763832410, rs763840955, rs763846944, rs763856141, rs763864225, rs763866523, rs763871417, rs763873671, rs763878249, rs763884347, rs763886416, rs763889172, rs763889854, rs763890908, rs763899275, rs763899522, rs763902373, rs763904447, rs763907570, rs763909482, rs763918855, rs763929134, rs763933824, rs763940408, rs763940839, rs763940950, rs763946656, rs764131648, rs764132316, rs764133976, rs764138048, rs764151659, rs764169316, rs764169400, rs764170250, rs764173664, rs764177129, rs764177387, rs764178855, rs764192950, rs764193030, rs764196607, rs764205276, rs764206794, rs764206848, rs764212883, rs764217699, rs764218839, rs764221004, rs764232168, rs764232894, rs764233553, rs764236220, rs764239215, rs764244609, rs764245530, rs764245844, rs765573761, rs765580244, rs765587894, rs765590408, rs765600723, rs765605656, rs765608113, rs765609965, rs764247738, rs764247863, rs764265147, rs764265731, rs764267708, rs764274958, rs764278019, rs764283152, rs764291848, rs764292301, rs764294060, rs764294184, rs764294505, rs764298701, rs764302256, rs764305361, rs764306823, rs764310596, rs764316571, rs764317752, rs764319041, rs764321862, rs764329082, rs764340833, rs764344539, rs764356977, rs764358910, rs764361070, rs764368082, rs764376457, rs764391289, rs764395962, rs764402318, rs764405085, rs764410151, rs764412081, rs764422077, rs764426513, rs764440483, rs764445144, rs764458340, rs764462858, rs764464282, rs762558889, rs762565401, rs762573223, rs762574656, rs762589570, rs762605718, rs762612764, rs762614739, rs762620644, rs762625556, rs762627851, rs762637692, rs762643050, rs762653886, rs762659080, rs762659305, rs762660060, rs762671379, rs762677885, rs762692644, rs762697134, rs762699737, rs762702687, rs762706570, rs762709562, rs762710859, rs762715551, rs762719704, rs762721594, rs762740616, rs762743459, rs762743477, rs762749911, rs762762657, rs762766290, rs762769139, rs762773029, rs762773288, rs762774605, rs762776577, rs762781139, rs762781837, rs762782062, rs762783329, rs762790760, rs762791546, rs762803232, rs762806915, rs762807086, rs764465084, rs764468756, rs764470109, rs764497007, rs764501944, rs764503745, rs764506187, rs764509988, rs764522554, rs764530276, rs764531803, rs764534352, rs764538782, rs764541244, rs764561430, rs764566382, rs764568532, rs764569332, rs764575880, rs764576102, rs764581389, rs764583645, rs762828985, rs762830738, rs764590660, rs764595525, rs764596520, rs764597877, rs764599442, rs764606274, rs764607646, rs764609667, rs764615438, rs764618096, rs764624292, rs764625508, rs764629557, rs764629624, rs764630374, rs764635054, rs764648516, rs764651238, rs764654252, rs764657750, rs764666653, rs764675272, rs764676103, rs764679898, rs764684190, rs764689158, rs764697229, rs764702050, rs764704236, rs764708021, rs764710503, rs764725521, rs764729314, rs764729407, rs764732889, rs764743213, rs764746305, rs764746449, rs764748755, rs764753811, rs764756603, rs764761855, rs764762372, rs764778065, rs764778619, rs764778682, rs764779269, rs764781327, rs764784038, rs764786676, rs764789948, rs764798363, rs764798906, rs764799521, rs764805105, rs764807695, rs764811624, rs764811771, rs764815862, rs764821703, rs764831822, rs764832349, rs764834924, rs764835474, rs764837275, rs764839142, rs764841316, rs764856863, rs764859172, rs764861651, rs764864234, rs764866830, rs764869235, rs764872873, rs764883421, rs764890867, rs764893169, rs764895001, rs764897598, rs764908371, rs764908816, rs764909529, rs764919105, rs764923366, rs764935081, rs764948730, rs764948894, rs764950490, rs764951580, rs764955192, rs764959227, rs763422439, rs763423825, rs763426547, rs763426934, rs763434673, rs763435995, rs763443354, rs763443828, rs763450003, rs763454494, rs763458288, rs763458317, rs763459752, rs763461860, rs763464347, rs763465892, rs763467765, rs763470622, rs763474378, rs763480874, rs763484341, rs763489118, rs763490105, rs763497047, rs763503267, rs763505176, rs765122901, rs765359050, rs765359968, rs765362749, rs765366801, rs765369920, rs765370059, rs765375499, rs765377074, rs765380654, rs765381077, rs765390059, rs763953492, rs763955144, rs763958524, rs763964423, rs763966141, rs763969524, rs763974830, rs763983586, rs763984104, rs763991399, rs763996071, rs764013978, rs764018600, rs764023933, rs764024605, rs764031448, rs764033300, rs764035833, rs764038711, rs764046421, rs764053957, rs764060943, rs764063944, rs764065508, rs764066938, rs764072397, rs764076269, rs764076978, rs764077748, rs764079187, rs764082891, rs764088905, rs764097788, rs764101277, rs764105200, rs764106062, rs764115716, rs764117374, rs764117388, rs764126726, rs764127599, rs765393019, rs766889356, rs766892796, rs765401485, rs765421571, rs765431683, rs765438960, rs765441671, rs765442618, rs765446402, rs765448131, rs765451133, rs765453826, rs765470284, rs765472651, rs765502665, rs765504063, rs765512228, rs765515681, rs765519057, rs765523411, rs765524982, rs765525216, rs765526531, rs765536326, rs765536786, rs765548166, rs765548596, rs765550472, rs765554801, rs765560549, rs767005813, rs767012065, rs767013359, rs767022715, rs767033537, rs767034871, rs767040430, rs767042492, rs767048826, rs767052405, rs765610504, rs765615918, rs765619687, rs765643678, rs765644498, rs765647141, rs765661766, rs765661884, rs765666348, rs765666634, rs765666883, rs765668448, rs765681670, rs765688414, rs765689172, rs765690602, rs765699885, rs765701336, rs765702136, rs765711067, rs765712338, rs765713091, rs765713551, rs765714277, rs765729995, rs765736378, rs765740005, rs765740055, rs765740775, rs765741590, rs765744306, rs765747765, rs765749695, rs765753087, rs765753644, rs765770971, rs765773491, rs765778640, rs765779810, rs765784368, rs765797886, rs765810662, rs765817742, rs765818566, rs765820826, rs765826979, rs765833035, rs765833656, rs765834619, rs765837658, rs765845934, rs765867035, rs765881705, rs765886403, rs765899690, rs765905840, rs765911794, rs765914439, rs765914753, rs765914783, rs765915442, rs765916013, rs765919423, rs765922421, rs765926944, rs765933273, rs765934434, rs765938578, rs765941502, rs765956353, rs765956734, rs765960304, rs765967315, rs765968110, rs765969295, rs765969702, rs765990886, rs765995759, rs766001988, rs766010255, rs766013799, rs766013839, rs766015649, rs766016843, rs766025398, rs766028035, rs766029511, rs766032260, rs766045056, rs766047504, rs766052571, rs766059699, rs766065558, rs766067660, rs766071796, rs766076921, rs766077710, rs766080944, rs766082530, rs766083263, rs766090198, rs766093697, rs766094026, rs766095971, rs766103678, rs766105433, rs766108101, rs766109320, rs766113873, rs766121635, rs766128568, rs766129643, rs766137808, rs766141459, rs766146104, rs766160139, rs766166913, rs766171581, rs766175222, rs766178431, rs766185846, rs766186797, rs766188429, rs766190666, rs766195364, rs766197313, rs766200683, rs766206624, rs766209283, rs766211609, rs766219825, rs766219860, rs766223046, rs766225476, rs766232054, rs766235284, rs766248080, rs766248804, rs766250556, rs766251617, rs766255156, rs766256132, rs766256353, rs766257849, rs766258119, rs766263138, rs766264846, rs766281525, rs766281976, rs766284385, rs766295607, rs766296358, rs766297737, rs766299111, rs766309042, rs766309273, rs766313262, rs766319180, rs766320199, rs766321542, rs766329944, rs766340388, rs766341239, rs766341904, rs766344238, rs766347152, rs766349452, rs766350462, rs766352358, rs766354731, rs766360431, rs766366375, rs766366582, rs766369100, rs766371088, rs766375972, rs766410489, rs766421723, rs766426528, rs766437074, rs766439099, rs766442321, rs766444107, rs766458269, rs766460181, rs766463094, rs766463829, rs766471265, rs766471369, rs766486608, rs766492369, rs766495436, rs766496312, rs766498108, rs766499421, rs766505029, rs766506519, rs766506928, rs766513191, rs766514565, rs766521929, rs766522858, rs766528033, rs766530812, rs766531596, rs766534059, rs766536888, rs766536919, rs764963250, rs764965268, rs764974227, rs764975284, rs764989327, rs764997549, rs765009577, rs765011883, rs765014131, rs765028458, rs765030991, rs765031378, rs765035870, rs765041639, rs765046894, rs765057523, rs765061925, rs766544091, rs766544500, rs766546934, rs766549014, rs766553825, rs766559394, rs766562668, rs766572825, rs766575163, rs766577754, rs766582670, rs766584334, rs766586917, rs766592036, rs766592516, rs765062353, rs765065239, rs765076790, rs765078121, rs765090104, rs765091624, rs765092043, rs765094135, rs765095824, rs765095979, rs765096074, rs765101862, rs766658386, rs765134000, rs765145052, rs765147424, rs765147566, rs765147790, rs765148938, rs765158481, rs765160847, rs765169749, rs765180786, rs765192243, rs765192334, rs765196566, rs765196892, rs765196999, rs765199229, rs765202639, rs765203811, rs765212538, rs765212989, rs765221914, rs765229255, rs765231666, rs765237305, rs765252521, rs765257252, rs765258185, rs765266135, rs765268566, rs765272813, rs765277361, rs765283577, rs765284238, rs765289072, rs765294241, rs765301863, rs765304422, rs765305356, rs765308404, rs765317921, rs765321642, rs765323448, rs765323751, rs765330204, rs765332791, rs765335746, rs765336655, rs765345772, rs765347223, rs768416172, rs768417657, rs768421774, rs768435216, rs768438747, rs768440157, rs768441120, rs768443372, rs765347938, rs765347945, rs765348194, rs765349390, rs765353177, rs765358413, rs766659695, rs766662315, rs766663702, rs766664928, rs766668370, rs766670980, rs766672284, rs766675544, rs766680944, rs766686366, rs766686619, rs766687425, rs766691387, rs766702847, rs766706658, rs766716707, rs766724170, rs766732392, rs766736187, rs766736351, rs766736801, rs766743969, rs766756006, rs766756624, rs766758016, rs766759674, rs766763759, rs766770752, rs766775043, rs766781916, rs766785815, rs766790023, rs766792103, rs766809012, rs766816456, rs766816598, rs766820636, rs766822331, rs766823558, rs766834865, rs766840624, rs766841104, rs766841468, rs766843802, rs766862883, rs766863128, rs766865775, rs766870275, rs766870575, rs766871442, rs766874168, rs766880465, rs766894756, rs766895669, rs766908085, rs766909163, rs766915166, rs766915939, rs766919584, rs766920075, rs766926031, rs766926536, rs766926617, rs766929961, rs766932532, rs766936061, rs766946786, rs766947182, rs766952088, rs766958158, rs766963799, rs766972876, rs766976533, rs766979256, rs766981761, rs766986262, rs766987226, rs766990977, rs766996057, rs766998237, rs767054234, rs767057345, rs767062730, rs767064517, rs767066183, rs767069876, rs767076174, rs767076460, rs767077869, rs767077988, rs767084844, rs767087691, rs767088213, rs767100021, rs767110285, rs767110717, rs767111545, rs767121547, rs767130058, rs767133601, rs767135767, rs767138122, rs767141839, rs767145594, rs767145656, rs767162716, rs767170439, rs767173337, rs767179146, rs767180059, rs767182516, rs767185284, rs767197263, rs767209477, rs767221324, rs767221993, rs767259822, rs767262242, rs767263420, rs767265332, rs767268659, rs767271046, rs767286787, rs767291167, rs767293656, rs767295003, rs767298250, rs767303722, rs767308288, rs767317176, rs767317207, rs767318211, rs767322953, rs767323786, rs767328245, rs767335865, rs767339923, rs767342776, rs767343810, rs767346089, rs767350806, rs767352336, rs767361140, rs767361374, rs767372972, rs767377577, rs767378447, rs767380269, rs767382476, rs767382658, rs767391907, rs767393270, rs767399089, rs767404792, rs767409095, rs767409519, rs767410482, rs767418309, rs767418653, rs767422315, rs767423595, rs767429586, rs767436271, rs767439097, rs767444430, rs767444868, rs767451809, rs767454788, rs767466339, rs767466530, rs767470269, rs767476980, rs767479408, rs767482083, rs767483472, rs767487746, rs767489522, rs767492541, rs767494596, rs767497614, rs767500149, rs767500768, rs767502824, rs767505983, rs767513269, rs767519414, rs767523602, rs767524521, rs767535228, rs767535586, rs767540192, rs767544432, rs767548317, rs767551347, rs767554373, rs767554448, rs767555725, rs767565927, rs767566213, rs767566809, rs767567641, rs767568445, rs767570303, rs767575668, rs767578648, rs767579190, rs767580202, rs767584890, rs767586637, rs767596225, rs767599513, rs767602927, rs767603936, rs767616516, rs767629238, rs767636758, rs767640802, rs767658706, rs767663547, rs767664705, rs767667973, rs767667989, rs767671585, rs767676452, rs767679200, rs767680232, rs767686227, rs767700071, rs767707787, rs767718142, rs767725662, rs767737970, rs767738591, rs767740139, rs767740417, rs767743721, rs767743850, rs767745336, rs767748369, rs767755286, rs767757278, rs767759571, rs767763277, rs767784355, rs767786357, rs767786475, rs767788273, rs767792179, rs767800885, rs767800901, rs767809291, rs767811462, rs767814882, rs767818183, rs767820073, rs767828000, rs767833779, rs767838173, rs767841404, rs767841898, rs767844446, rs767852770, rs767853707, rs767871384, rs767872259, rs767883080, rs767883233, rs767884795, rs767885350, rs767887406, rs767898222, rs767902242, rs767902650, rs767903280, rs767904069, rs767905859, rs767920041, rs767921288, rs767929765, rs767938184, rs767954156, rs767955183, rs767961477, rs767962240, rs767965819, rs767965973, rs767968516, rs767970280, rs767973977, rs767975386, rs767975911, rs767983510, rs767986399, rs768009368, rs768016657, rs769853940, rs769854840, rs769864752, rs769874288, rs769874549, rs769880024, rs769883505, rs769892286, rs769893713, rs768020694, rs768031063, rs768032136, rs768045838, rs768051568, rs768052891, rs768064892, rs766593024, rs766594488, rs766597333, rs766601217, rs766601403, rs766624833, rs766628988, rs766633195, rs766642494, rs766644465, rs766645021, rs768206043, rs769988414, rs769988563, rs769991509, rs769992306, rs768210953, rs768212294, rs768217017, rs768225714, rs768231787, rs768241894, rs768245509, rs768261118, rs768262267, rs768272869, rs768273589, rs768275931, rs768277390, rs768283037, rs768284007, rs768287271, rs768290882, rs768292542, rs768295224, rs768295963, rs768298446, rs768302640, rs768306999, rs768307912, rs768313329, rs768317170, rs768324924, rs768330208, rs768330899, rs768334114, rs768334178, rs768340640, rs768346499, rs768351305, rs768351769, rs768354295, rs768359300, rs768365411, rs768366388, rs768370080, rs768370204, rs768371549, rs768378932, rs768380006, rs768382095, rs768383938, rs768388430, rs768396088, rs768443697, rs768448197, rs768452353, rs768458445, rs768468111, rs768470041, rs768491498, rs768505815, rs768515228, rs768521045, rs768523925, rs768525220, rs768527940, rs768529567, rs768536754, rs768538467, rs768543507, rs768546608, rs768553205, rs768554936, rs768555263, rs768558663, rs768561379, rs768568601, rs768578184, rs768579216, rs768579735, rs768582015, rs768588161, rs768594956, rs768602261, rs768602307, rs768610149, rs768616159, rs768626192, rs768626340, rs768627154, rs768630352, rs768636795, rs768641938, rs768654989, rs768657318, rs768673703, rs768683451, rs768685078, rs768686411, rs768687064, rs768687559, rs768688454, rs768694015, rs768696793, rs768709391, rs768709409, rs768711907, rs768732602, rs768736334, rs768746497, rs768747069, rs768749372, rs768758285, rs768758911, rs768766369, rs768767271, rs768772407, rs768774701, rs768780023, rs768787366, rs768789247, rs768790882, rs768794263, rs768794998, rs768800565, rs768803817, rs768810174, rs768818714, rs768820982, rs768821156, rs768835147, rs768836100, rs768840138, rs768843784, rs768845819, rs768846392, rs768848127, rs768851150, rs768859042, rs768859539, rs768861138, rs768864490, rs768868296, rs768868755, rs768871355, rs768874739, rs768880612, rs768883624, rs768884356, rs768893883, rs768910575, rs768914124, rs768918821, rs768922010, rs768926103, rs768935236, rs768936110, rs768944924, rs768949827, rs768954591, rs768956228, rs768959353, rs768965761, rs768974437, rs768986528, rs768988581, rs768990876, rs768993263, rs769002279, rs769011882, rs769016244, rs769016751, rs769022912, rs769032170, rs769045194, rs769047687, rs769057725, rs769062038, rs769063905, rs769069088, rs769077288, rs769078268, rs769079667, rs769079696, rs769080432, rs769086418, rs769088033, rs769093977, rs769101663, rs769114565, rs769126271, rs769132159, rs769135111, rs769146156, rs769147346, rs769150942, rs769156105, rs769160266, rs769163048, rs769173629, rs769177453, rs769178119, rs769179338, rs769179378, rs769186138, rs769187963, rs769188839, rs769191520, rs769193696, rs769202412, rs769202668, rs769202939, rs769204081, rs769204860, rs769215692, rs769225415, rs769245429, rs769257288, rs769260790, rs769263037, rs769268202, rs769269776, rs769282322, rs769287221, rs769293947, rs769307761, rs769315556, rs769318084, rs769324317, rs769325144, rs769328904, rs769331496, rs769335993, rs769336230, rs769341000, rs769345254, rs769353146, rs769358660, rs769369094, rs769372353, rs769372458, rs769372881, rs769373172, rs769375184, rs769379078, rs769379332, rs769380554, rs769382161, rs769384856, rs769388401, rs769399137, rs769402469, rs769411585, rs769421720, rs769425833, rs769430468, rs769430875, rs769436472, rs769443435, rs769445809, rs769458110, rs769468521, rs769470637, rs769476737, rs769480101, rs769488355, rs769489100, rs769489135, rs769491509, rs769493998, rs769499427, rs769499659, rs769506673, rs769616939, rs769630172, rs769642089, rs769646874, rs769650359, rs769650593, rs769655239, rs769655658, rs769661565, rs769663336, rs769663934, rs769665275, rs769674863, rs769678693, rs769698483, rs769700730, rs769706751, rs769767358, rs769769726, rs769773387, rs769778162, rs769780040, rs769788142, rs769792357, rs769793645, rs769794867, rs768068032, rs768082152, rs768086154, rs768088216, rs768098423, rs768110812, rs768112260, rs768112460, rs768115592, rs768116256, rs768117128, rs768123410, rs768128617, rs768131220, rs768131709, rs768140682, rs768143787, rs768144191, rs768163730, rs768171879, rs768172927, rs768179040, rs768192319, rs768193456, rs768194086, rs768194126, rs768195600, rs768200214, rs768203057, rs768204363, rs768205173, rs769993667, rs771474826, rs771489483, rs771496867, rs771500840, rs771501857, rs771506962, rs771517111, rs771527808, rs771530562, rs771543089, rs771549997, rs771551486, rs771552354, rs771556015, rs769998511, rs769999664, rs770001312, rs770006637, rs770006891, rs770012434, rs770014101, rs770015133, rs770018137, rs770034224, rs770036318, rs770044926, rs770046783, rs770054898, rs770055063, rs770058096, rs770061053, rs770063449, rs770065657, rs770066956, rs770077892, rs770081170, rs770081805, rs770082970, rs770084568, rs770088122, rs770092031, rs770100690, rs770100907, rs770114676, rs770131339, rs770137154, rs770137549, rs770137786, rs770151012, rs770156297, rs770156955, rs770164936, rs770168613, rs770177664, rs770183015, rs770201037, rs770202170, rs770221520, rs770222592, rs770232522, rs770235141, rs770237084, rs770248219, rs770248583, rs770250342, rs770252982, rs770262799, rs770267074, rs770273023, rs770273217, rs770274335, rs770275461, rs770278984, rs770296949, rs770300661, rs770300783, rs770301424, rs770302223, rs770315050, rs770315686, rs770322091, rs770334963, rs770335935, rs770336393, rs770339380, rs770342149, rs770348327, rs770366264, rs770378272, rs770379316, rs770406293, rs770407531, rs770416155, rs770416797, rs770417694, rs770421263, rs770422652, rs770422963, rs770425909, rs770433794, rs770441890, rs770444213, rs770447692, rs770451975, rs770452391, rs770456439, rs770464694, rs770465565, rs770467054, rs770475480, rs770487838, rs770492467, rs770493651, rs770502247, rs770504180, rs770516704, rs770520233, rs770522554, rs770532311, rs770537285, rs770537658, rs770541414, rs770552254, rs770563715, rs770564778, rs770567415, rs770573062, rs770573635, rs770578040, rs770581678, rs770582798, rs770591464, rs770593237, rs770597223, rs770607406, rs770609784, rs770615109, rs770617208, rs770617230, rs770617984, rs770621229, rs770623465, rs770627538, rs770629486, rs770631863, rs770632725, rs770640142, rs770646696, rs770647648, rs770647752, rs770648707, rs770655990, rs770677320, rs770681374, rs770683191, rs770699603, rs770700013, rs770706792, rs770707426, rs770714449, rs770714925, rs770715939, rs770719220, rs770722239, rs770725537, rs770731879, rs770736966, rs770746569, rs770748398, rs770754669, rs770754988, rs770758508, rs770771202, rs770774752, rs770776293, rs770776853, rs770777119, rs770777721, rs770783392, rs770787768, rs770796865, rs770796923, rs770812273, rs770816782, rs770817265, rs770817480, rs770817845, rs770820995, rs770828414, rs770839459, rs770844453, rs770846991, rs770852976, rs770868072, rs770873722, rs770876675, rs770882086, rs770886157, rs770886363, rs770890069, rs770895341, rs770897701, rs770901625, rs770902904, rs770904109, rs770911595, rs770922432, rs770926147, rs770932681, rs770933036, rs770944684, rs770945911, rs770946562, rs770950656, rs770955435, rs770960536, rs770963829, rs770964216, rs770967009, rs770970220, rs770970706, rs770971338, rs770974840, rs770974901, rs770975347, rs770980196, rs770980533, rs770991403, rs770993702, rs770995893, rs771008679, rs771012140, rs771013347, rs771014511, rs771018686, rs771020161, rs771024340, rs771033182, rs771040530, rs771044261, rs771045227, rs771046502, rs771047521, rs771050796, rs771058821, rs771062387, rs771062444, rs771074704, rs771075414, rs771078574, rs771079475, rs771083633, rs771092862, rs771095491, rs771097333, rs769510446, rs769517774, rs769524940, rs769529737, rs769529803, rs769531151, rs769546206, rs769549732, rs769562504, rs769563527, rs769564369, rs769565064, rs769571310, rs769573899, rs769574222, rs769577654, rs769578906, rs769579189, rs769580000, rs769582085, rs769583090, rs769587031, rs769591354, rs769591669, rs769593583, rs769595701, rs769611474, rs769616630, rs769712525, rs769714484, rs769725320, rs769729623, rs769729865, rs769731295, rs769735319, rs769737955, rs769739691, rs769740679, rs769749250, rs769751201, rs769752822, rs769754064, rs769759300, rs769762582, rs769796989, rs769801344, rs769815371, rs769822728, rs769824186, rs769830195, rs769833261, rs772894533, rs772900293, rs772907814, rs772911674, rs772917208, rs772918663, rs772920457, rs769837972, rs769839754, rs769845013, rs769846990, rs769897747, rs769898025, rs769911025, rs769911870, rs769912345, rs769913056, rs769924959, rs769937690, rs769938953, rs769939576, rs769954741, rs769954804, rs769957262, rs769969441, rs769973316, rs769976778, rs769979048, rs769982019, rs769982089, rs771557438, rs771558157, rs771574644, rs771582349, rs771584426, rs771589900, rs771593002, rs771605830, rs771610270, rs771610700, rs771614300, rs771614533, rs771616248, rs771620425, rs771629320, rs771636825, rs771639611, rs771642852, rs771645138, rs771648786, rs771649127, rs771650832, rs771651373, rs771660123, rs771664354, rs771666196, rs771667916, rs771668852, rs771670968, rs771675062, rs771682107, rs771691883, rs771700086, rs771706182, rs771710234, rs771712768, rs771715173, rs771715952, rs771718583, rs771718586, rs771722504, rs771726190, rs771727637, rs771737761, rs771740395, rs771749509, rs771750154, rs771752344, rs771763761, rs771776042, rs771777047, rs771780718, rs771784488, rs771784524, rs771786673, rs771788434, rs771790919, rs771798483, rs771799921, rs771805734, rs771835420, rs771836167, rs771843079, rs771845417, rs771849026, rs771856549, rs771860209, rs771862072, rs771870807, rs771871865, rs771881665, rs771883639, rs771883932, rs771888410, rs771888622, rs771891309, rs771901473, rs771905176, rs771909197, rs771909935, rs771910831, rs771916623, rs771917560, rs771921618, rs771928617, rs771936934, rs771942383, rs771943959, rs771944569, rs771951161, rs771960898, rs771962296, rs771968912, rs771970939, rs771973792, rs771974907, rs771978053, rs771997745, rs772001199, rs772013289, rs772017503, rs772029216, rs772041566, rs772048019, rs772058170, rs772062994, rs772070040, rs772080116, rs772084371, rs772100297, rs772112751, rs772113046, rs772114032, rs772115201, rs772115274, rs772117294, rs772127781, rs772128465, rs772137129, rs772138745, rs772140946, rs772147916, rs772157252, rs772163051, rs772172629, rs772176476, rs772177253, rs772177953, rs772178898, rs772179469, rs772184574, rs772192888, rs772192897, rs772194571, rs772199603, rs772200388, rs772202715, rs772203178, rs772211223, rs772217284, rs772219388, rs772224401, rs772231200, rs772233152, rs772243017, rs772243452, rs772258996, rs772259812, rs772262730, rs772265180, rs772275813, rs772276039, rs772276661, rs772277286, rs772279738, rs772284564, rs772291882, rs772297662, rs772298929, rs772302560, rs772305954, rs772319770, rs772323898, rs772331276, rs772332071, rs772341790, rs772345018, rs772348522, rs772353943, rs772358536, rs772360357, rs772364128, rs772375392, rs772386417, rs772396517, rs772410686, rs772412221, rs772413611, rs772417670, rs772421070, rs772422806, rs772423459, rs772427395, rs772430062, rs772444566, rs772446229, rs772452014, rs772453331, rs772454284, rs772455749, rs772460975, rs772463427, rs772485085, rs772488082, rs772492365, rs772492969, rs772495914, rs772501065, rs772507177, rs772511086, rs772512265, rs772515793, rs772524542, rs772524545, rs772530409, rs772531463, rs772541077, rs772542048, rs772659261, rs772664232, rs772666610, rs772671509, rs772671644, rs772672233, rs772673769, rs772677697, rs772678723, rs772681021, rs772682837, rs772684309, rs772687423, rs772689026, rs771100260, rs771106321, rs771106376, rs771112571, rs771122182, rs771123155, rs771124325, rs771128585, rs771133988, rs771138153, rs771141152, rs771142089, rs771147512, rs771147660, rs771149220, rs771152180, rs771152924, rs771161825, rs771164424, rs771168115, rs771175067, rs771175179, rs771181327, rs771183133, rs771185171, rs771192773, rs771192954, rs772690669, rs772691368, rs772694260, rs772694598, rs772703774, rs772718258, rs772719363, rs772722424, rs772731876, rs774217149, rs774217803, rs774225101, rs774232186, rs774237807, rs774243931, rs774247152, rs774255415, rs772733693, rs772736148, rs772744246, rs772749474, rs772752002, rs772763260, rs772767505, rs772770454, rs772777324, rs772788146, rs772796883, rs772797954, rs772799915, rs772800116, rs772800652, rs772807124, rs772809036, rs772812413, rs772812598, rs771196571, rs771200905, rs771209633, rs771222605, rs771226087, rs771227367, rs771230032, rs771230276, rs771230382, rs771238271, rs771245033, rs771272229, rs771273405, rs771277744, rs771281724, rs771287815, rs771289738, rs772823281, rs772823668, rs772827595, rs772828908, rs772829129, rs772829764, rs772842445, rs772848641, rs772850341, rs772850464, rs772851519, rs772864273, rs772866421, rs772868379, rs772875079, rs772875118, rs771293502, rs771297225, rs771299779, rs771301230, rs771306186, rs771310827, rs771311112, rs771312119, rs771318585, rs772885785, rs772887079, rs772887920, rs772889002, rs772890149, rs772893605, rs771321242, rs771325728, rs771328385, rs771329326, rs771331987, rs771334318, rs771337155, rs771341318, rs771343379, rs771360097, rs771368320, rs771372677, rs771386914, rs771387826, rs771388746, rs771389473, rs771391781, rs771393538, rs771399334, rs771402735, rs771403827, rs771406656, rs771407313, rs771409269, rs771409410, rs771413582, rs771432104, rs771435519, rs771452803, rs771455841, rs771466032, rs773013199, rs774718033, rs774721209, rs774723745, rs774732889, rs774736423, rs774742239, rs773022148, rs773025032, rs773025359, rs773032468, rs773050162, rs773053461, rs773053547, rs773058043, rs773059325, rs773061345, rs773062902, rs773067920, rs773072545, rs773075443, rs773077537, rs773080150, rs773084934, rs773085308, rs773086404, rs773090354, rs773100289, rs773101123, rs773103982, rs773110471, rs773111291, rs773112189, rs773136834, rs773141468, rs773141840, rs773151941, rs773157269, rs773157433, rs773161709, rs773172737, rs773177725, rs773180748, rs773203609, rs773209126, rs773209534, rs773209615, rs773220457, rs773220512, rs773223080, rs773226460, rs773232228, rs773237240, rs773242932, rs773257064, rs773260655, rs773260996, rs773262345, rs773262940, rs773265199, rs773284154, rs773285049, rs773288301, rs773290600, rs773292382, rs773295000, rs773299686, rs773309064, rs773317251, rs773319038, rs773321610, rs773322416, rs773328808, rs773330996, rs773342291, rs773349281, rs773353414, rs773358073, rs773360993, rs773370629, rs773371445, rs773374895, rs773384234, rs773390089, rs773393898, rs773397435, rs773400902, rs773403278, rs773414444, rs773415723, rs773417245, rs773422890, rs773424278, rs773432548, rs773445051, rs773448916, rs773454108, rs773456118, rs773458476, rs773460712, rs773464447, rs773469216, rs773470863, rs773473990, rs773474443, rs773475924, rs773485531, rs773487711, rs773490150, rs773490601, rs773490789, rs773491468, rs773496527, rs773497092, rs773498119, rs773498222, rs773498633, rs773504100, rs773510333, rs773514041, rs773514231, rs773515972, rs773517694, rs773537709, rs773541679, rs773544163, rs773544474, rs773545802, rs773547532, rs773560203, rs773560791, rs773568298, rs773571354, rs773571866, rs773582066, rs773582792, rs773590228, rs773603352, rs773606064, rs773611763, rs773613762, rs773613981, rs773623089, rs773627120, rs773628741, rs773635787, rs773638377, rs773658276, rs773662469, rs773663900, rs773665525, rs773671486, rs773673751, rs773673835, rs773679068, rs773686617, rs773704450, rs773706209, rs773712054, rs773712741, rs773713673, rs773715912, rs773720661, rs775485563, rs775485700, rs775487956, rs775490754, rs775494681, rs775496177, rs775504308, rs775507139, rs775513594, rs773721824, rs773724438, rs773724904, rs773731607, rs773734403, rs773740037, rs773746820, rs773756252, rs773760859, rs773764308, rs773775350, rs773787257, rs773787794, rs773793569, rs773799185, rs773802779, rs773810593, rs773828278, rs773970569, rs773972059, rs773978892, rs773983523, rs772553441, rs772556644, rs772557271, rs772561287, rs772561346, rs772563680, rs772565055, rs772580722, rs772592314, rs772599361, rs772599657, rs772601023, rs772602116, rs772629588, rs772630070, rs772631522, rs772636152, rs772636465, rs772646487, rs772652483, rs773997683, rs774012667, rs774019483, rs774022088, rs774037984, rs774039475, rs774046017, rs774048845, rs774049945, rs774051471, rs774054727, rs774057744, rs774063641, rs774075859, rs774081416, rs774081763, rs774084090, rs774088644, rs774092728, rs774099697, rs774102532, rs774106540, rs774110380, rs774113851, rs774117820, rs774124300, rs774125840, rs774125998, rs774126899, rs774128029, rs774128524, rs774139365, rs774144500, rs774153043, rs774157763, rs774160802, rs774165178, rs774169558, rs774173551, rs774174034, rs774181390, rs774198228, rs774200421, rs774204555, rs774206405, rs774208332, rs774208594, rs774209214, rs774216818, rs774255539, rs774256103, rs774262553, rs774268198, rs774268907, rs774274076, rs774275833, rs774276037, rs774276513, rs774286625, rs774287164, rs774289901, rs774297430, rs774298438, rs774301172, rs774302893, rs774313532, rs774313945, rs774319140, rs774333860, rs774338738, rs774338774, rs774347102, rs774350218, rs774355468, rs774358205, rs774371708, rs774374043, rs774376845, rs774383043, rs774386349, rs774395442, rs774400289, rs774412379, rs774418508, rs774419433, rs774421399, rs774430110, rs774435152, rs774435211, rs774436671, rs774453111, rs774458647, rs774461605, rs774464243, rs774471522, rs774472915, rs774483148, rs774490443, rs774493455, rs774496489, rs774501094, rs774501184, rs774505007, rs774514857, rs774535125, rs774542927, rs774545715, rs774551107, rs774551836, rs774556552, rs774563056, rs774575186, rs774576989, rs774582589, rs774586265, rs772921164, rs772923092, rs772930587, rs772931612, rs772936497, rs772946156, rs772952574, rs772958683, rs772961570, rs772968721, rs772969130, rs772972687, rs772981686, rs772981731, rs772985431, rs772990243, rs772990245, rs772991501, rs772992607, rs772999233, rs773000879, rs773006665, rs773010995, rs773011415, rs774746232, rs774747518, rs774750858, rs774754215, rs774755881, rs774768742, rs774774285, rs774774412, rs774774975, rs774777467, rs774777789, rs774781619, rs774784657, rs774793430, rs774800301, rs774804507, rs774806165, rs774807212, rs774807922, rs774814281, rs774818518, rs774829676, rs774833665, rs774837495, rs774845998, rs774849619, rs774851746, rs774852922, rs774856657, rs774860649, rs774862110, rs774870362, rs774875437, rs774886204, rs774888922, rs774889370, rs774890003, rs774892252, rs774899261, rs774905930, rs774910490, rs774911759, rs774918437, rs774920109, rs774921488, rs774925181, rs774926850, rs774927070, rs774938618, rs774954199, rs774957204, rs774972161, rs774972945, rs774974184, rs774978774, rs774986305, rs774998060, rs774998761, rs775017229, rs775020639, rs775023997, rs775026662, rs775032273, rs775039234, rs775043585, rs775043943, rs775052940, rs775054876, rs775077652, rs775085400, rs775087028, rs775087641, rs775089069, rs775093967, rs775098972, rs775106996, rs775108859, rs775108959, rs775109921, rs775112258, rs775116632, rs775121556, rs775127892, rs775133290, rs775135005, rs775145596, rs775158044, rs775160367, rs775161669, rs775162011, rs775167258, rs775172799, rs775183456, rs775185063, rs775185086, rs773833405, rs773834760, rs773842052, rs773845656, rs773852221, rs773853067, rs773869951, rs773872834, rs773877453, rs773879877, rs773886798, rs773890266, rs773896706, rs773906126, rs773913728, rs773916727, rs773920800, rs773923833, rs773927293, rs773928164, rs773929989, rs773934052, rs773938123, rs773943370, rs773945457, rs773959834, rs773967249, rs773968500, rs773969616, rs774586597, rs774587290, rs774588514, rs774590726, rs774596682, rs774603846, rs774604077, rs774604491, rs774609703, rs774613255, rs774614121, rs774615890, rs774624836, rs774630315, rs774632474, rs774647073, rs774656522, rs774661135, rs774665866, rs774667807, rs774669877, rs774671891, rs774673231, rs774678521, rs774685492, rs774687955, rs774688177, rs774699848, rs774705252, rs774713726, rs774714971, rs774715616, rs774715663, rs776321826, rs776323684, rs776330834, rs775300735, rs775309203, rs775313834, rs775315718, rs775316325, rs775321383, rs775322557, rs775335741, rs775342669, rs775351207, rs775355445, rs775361763, rs775367626, rs775382011, rs775383414, rs775391370, rs775398071, rs775398131, rs775402580, rs775406049, rs775406215, rs775406304, rs775408861, rs775412846, rs775412909, rs775414499, rs775414629, rs775415222, rs775422845, rs775432306, rs775437942, rs775440512, rs775441772, rs775445533, rs775451907, rs775452209, rs775462601, rs775462711, rs775465914, rs775475060, rs775485237, rs775518204, rs775521103, rs775527503, rs775535120, rs775535395, rs775539997, rs775546216, rs775546634, rs775546822, rs775547315, rs775557142, rs775560168, rs775566250, rs775570308, rs775576704, rs775577296, rs775578522, rs775585048, rs775589065, rs775599698, rs775603569, rs775610142, rs775611475, rs775619694, rs775625378, rs775636645, rs775648085, rs775651055, rs775659273, rs775660359, rs775662272, rs775673075, rs775673398, rs775674901, rs775676341, rs775684679, rs775697238, rs775705429, rs775706776, rs775711190, rs775712376, rs775713974, rs775723415, rs775724216, rs775732007, rs775732026, rs775732085, rs775733047, rs775737785, rs775750967, rs775759492, rs775763219, rs775768989, rs775780764, rs775783434, rs775786169, rs775786492, rs775789076, rs775789343, rs775789449, rs775791328, rs775794107, rs775794127, rs775797252, rs775798908, rs775816400, rs775821614, rs775822078, rs775824377, rs775825512, rs775836140, rs775843488, rs775847695, rs775850044, rs775850981, rs775857712, rs775866006, rs775867701, rs775871383, rs775874663, rs775875372, rs775880950, rs775882009, rs775882953, rs775888494, rs775893761, rs775894928, rs775895547, rs775906839, rs775912205, rs775923072, rs777595475, rs777597861, rs777605510, rs777609314, rs777609903, rs777610604, rs777611401, rs777612459, rs777618206, rs777624458, rs775928857, rs775929089, rs775931402, rs775935606, rs775938166, rs775938293, rs775942020, rs775946731, rs775976775, rs775991273, rs775994060, rs775997503, rs776008167, rs776009293, rs776016701, rs776018252, rs776022334, rs776026031, rs776033983, rs776038370, rs776040986, rs776041122, rs776042035, rs776050258, rs776056844, rs776060241, rs776062610, rs776063665, rs776063872, rs776065468, rs776076709, rs776081448, rs776082696, rs776091439, rs776095411, rs776095962, rs776101726, rs776104105, rs776111820, rs776111824, rs776112996, rs776114600, rs776115168, rs776117376, rs776123045, rs776136726, rs776140105, rs776140294, rs776149393, rs776151620, rs776157251, rs776168550, rs776176043, rs776176395, rs776177215, rs776178410, rs776182977, rs776190977, rs776191536, rs776197295, rs776304330, rs776304369, rs776304761, rs776307857, rs776307922, rs776318984, rs776989976, rs777919045, rs777929370, rs776991196, rs777002679, rs776331307, rs776334893, rs776336096, rs776338853, rs776343430, rs776343818, rs776351388, rs776357994, rs776360049, rs776360370, rs776361630, rs776376557, rs776376905, rs776383743, rs776383930, rs776384297, rs776393787, rs776395666, rs776397743, rs775193498, rs775194467, rs775196833, rs775200337, rs775213150, rs775215350, rs775215354, rs775221577, rs775236182, rs775239366, rs775255714, rs775260932, rs775272140, rs775273550, rs775278003, rs775279858, rs775286908, rs775291506, rs775297974, rs775299129, rs777063837, rs777063954, rs777072204, rs777077267, rs777081108, rs777081346, rs777082683, rs777086533, rs777093991, rs777097950, rs777107324, rs777107495, rs777108752, rs777114025, rs777116636, rs777121986, rs777129293, rs777134069, rs777139467, rs778258663, rs778265787, rs778267504, rs778270242, rs778271978, rs778281707, rs778286320, rs778290500, rs778293260, rs778294941, rs778297793, rs777146325, rs777146486, rs777150027, rs777151397, rs777152172, rs777152609, rs777154877, rs777158791, rs777158910, rs777159233, rs777160404, rs777171128, rs777174755, rs777179926, rs777180435, rs777187188, rs777197674, rs777208716, rs777223549, rs777224662, rs777225063, rs777225218, rs777226967, rs777230829, rs777232802, rs777238472, rs777240072, rs777241779, rs776810783, rs776814234, rs776820266, rs776825349, rs776835958, rs776838795, rs776840476, rs776845574, rs777246507, rs777254998, rs777257928, rs777260794, rs777270253, rs777274086, rs777276610, rs777285673, rs777291585, rs777295423, rs777299138, rs777302766, rs777303635, rs777308198, rs777318111, rs777318527, rs777320266, rs777325456, rs777327817, rs777328446, rs777339519, rs777349364, rs777349999, rs777353251, rs777360094, rs777364919, rs777365621, rs777367154, rs777375461, rs777383587, rs777390380, rs777393367, rs777393530, rs777394076, rs777396137, rs777400032, rs777403335, rs777429058, rs777437499, rs777450345, rs777453920, rs777460607, rs777465478, rs777466612, rs777467182, rs777470892, rs777471639, rs777475576, rs777476613, rs777478084, rs777479403, rs777479693, rs777485624, rs777491571, rs777505566, rs777515209, rs777517081, rs777532342, rs777535490, rs777539128, rs777539498, rs777540954, rs777543754, rs777549377, rs777551587, rs777555158, rs777561719, rs777577251, rs777586618, rs777592297, rs777593457, rs777635026, rs777636180, rs777637457, rs777643285, rs777644285, rs777645009, rs777649221, rs777649775, rs777651018, rs777651806, rs777652464, rs777655693, rs777657451, rs777658430, rs777660786, rs776010138, rs776015651, rs776016167, rs777662258, rs777664724, rs777676913, rs777679192, rs777681212, rs777685975, rs777697513, rs777702173, rs777705919, rs777713042, rs777720408, rs777725223, rs777737275, rs777740228, rs777745890, rs777754743, rs777765933, rs777769621, rs777770807, rs777772973, rs776206785, rs776214107, rs776214959, rs776218712, rs776225648, rs776231775, rs776239309, rs776241270, rs776245005, rs776247550, rs776253891, rs776258336, rs776266231, rs776270022, rs776273755, rs776277172, rs776279074, rs776281729, rs776285741, rs776300068, rs776301171, rs776301923, rs777934351, rs777937759, rs777950366, rs777955871, rs777959370, rs777964192, rs777964581, rs777970524, rs777977352, rs777981688, rs777984506, rs777998194, rs778005619, rs778018638, rs778024363, rs778031714, rs778039508, rs778050587, rs778054701, rs778055545, rs778058936, rs778059153, rs776404344, rs776411809, rs776412628, rs776413827, rs776414734, rs776425535, rs776431152, rs776431512, rs776443833, rs776444054, rs776449772, rs776450820, rs776457288, rs776459187, rs776466578, rs776466779, rs776466922, rs776467218, rs776469196, rs776473207, rs776483176, rs776484483, rs776487853, rs776492412, rs776499165, rs776500284, rs776505372, rs776512485, rs776518788, rs776518946, rs776531251, rs776541041, rs776546727, rs776548207, rs776556374, rs776556927, rs776558720, rs776560727, rs776563800, rs776565667, rs776569010, rs776576561, rs776577352, rs776585814, rs776586897, rs776601177, rs776609946, rs776611451, rs776626795, rs776628691, rs776635580, rs776642581, rs776645385, rs776651034, rs776655463, rs776659135, rs776665392, rs776675867, rs776679646, rs776679687, rs776682659, rs776684417, rs776686601, rs776687805, rs776689786, rs776690111, rs776696101, rs776705273, rs776708739, rs776714001, rs776716454, rs776721558, rs776723238, rs778062816, rs778069038, rs778072746, rs778082586, rs778090187, rs778093727, rs778099235, rs778102056, rs778106503, rs778107743, rs778112316, rs778114654, rs778123768, rs778136944, rs778137006, rs778142642, rs778147898, rs778153433, rs778156313, rs778158710, rs777005360, rs777009603, rs777010296, rs777020798, rs777022755, rs777024162, rs777028430, rs777029608, rs777032646, rs777051263, rs777051550, rs777059755, rs777060073, rs778160195, rs778166025, rs778168410, rs778169680, rs778179527, rs778192045, rs778196339, rs778196377, rs778199132, rs778201136, rs778205342, rs778209474, rs778217361, rs778217620, rs778227134, rs778235863, rs778250160, rs778250351, rs778317993, rs778318152, rs778319385, rs778323413, rs778324822, rs778333998, rs778342246, rs778344924, rs778346955, rs778347088, rs778349424, rs778354880, rs778355308, rs778365875, rs778370179, rs778378665, rs778379496, rs778382633, rs778388016, rs778397315, rs778397633, rs778401081, rs778416370, rs778418470, rs778428420, rs778433568, rs778436764, rs778437126, rs778446606, rs776725027, rs776732677, rs776741069, rs776750285, rs776753615, rs776760209, rs776761937, rs776768593, rs776769559, rs776772847, rs776777494, rs776778580, rs776780831, rs776785855, rs776791179, rs776793837, rs776801918, rs776805915, rs776808787, rs778453177, rs778457227, rs778461552, rs778469625, rs778471241, rs778474768, rs778477485, rs778478301, rs776858623, rs776858858, rs778482392, rs778486927, rs778498141, rs778502164, rs778508010, rs778508100, rs778510553, rs778511560, rs778521592, rs778525925, rs778529249, rs778530548, rs778530597, rs778537111, rs778539477, rs778547058, rs778548075, rs778555857, rs778561976, rs778564735, rs778572788, rs778578011, rs778599779, rs778600978, rs778611303, rs778612566, rs778616180, rs778619361, rs778634166, rs778640821, rs778647355, rs778653508, rs778654198, rs778659315, rs778664272, rs778668864, rs778681321, rs778686950, rs778690159, rs778701587, rs778712933, rs778735086, rs778741997, rs778750945, rs778752157, rs778753132, rs777773956, rs777775474, rs777777761, rs777782654, rs777786245, rs777786572, rs777787502, rs777813084, rs777814836, rs777815750, rs777819594, rs777820168, rs777820542, rs777831535, rs777836126, rs777840278, rs777844215, rs777845522, rs777846139, rs777846477, rs777848945, rs777854742, rs777860764, rs777866426, rs777870520, rs777879530, rs776860759, rs776874173, rs776883462, rs776885916, rs776889674, rs776893166, rs780501686, rs780503627, rs780507715, rs780509787, rs780515351, rs780533768, rs780534074, rs780535538, rs776894184, rs776903685, rs776905967, rs776913896, rs776916289, rs776918681, rs776919131, rs776924642, rs776925133, rs776925700, rs776929003, rs776929860, rs776930004, rs776930650, rs776934751, rs777880065, rs777889758, rs777892253, rs777910444, rs777915618, rs777917781, rs776943729, rs776946542, rs776955857, rs776958287, rs776963498, rs776971214, rs776971952, rs776973563, rs776974497, rs776974788, rs776977433, rs776977561, rs779253125, rs779253351, rs779255727, rs779257378, rs779265664, rs779275693, rs779277302, rs779283346, rs779283944, rs779295092, rs779297005, rs779297500, rs779300446, rs779307208, rs779323292, rs779326725, rs779326947, rs779331342, rs779337778, rs779342764, rs779347876, rs779353849, rs779357543, rs779359554, rs779361221, rs779362221, rs779363244, rs779363505, rs779366785, rs779374721, rs779380206, rs779387507, rs779395756, rs779399616, rs779400738, rs779404964, rs779406605, rs779417197, rs779418295, rs779419867, rs779421508, rs779423546, rs779433670, rs779438177, rs779450427, rs779451043, rs779451592, rs779455368, rs779456981, rs779466137, rs779467247, rs779467311, rs779467951, rs779473932, rs779483598, rs779486579, rs779487998, rs779496655, rs779508493, rs779511387, rs779511513, rs779522400, rs779524640, rs779524808, rs779529626, rs779539157, rs779542581, rs779544271, rs779547295, rs779552161, rs779552247, rs779557062, rs779557945, rs779559850, rs779571946, rs779575497, rs779576169, rs779577371, rs779588882, rs779601481, rs779602499, rs779617226, rs779624926, rs779626907, rs779638806, rs779643898, rs779644372, rs779654459, rs779662571, rs779669979, rs779671094, rs779673088, rs779675921, rs779684833, rs779688221, rs779690837, rs779698243, rs779701625, rs779703997, rs779705960, rs779706729, rs779719822, rs779726137, rs779727422, rs779731083, rs779738150, rs779738860, rs779755619, rs779763761, rs779774632, rs779776317, rs779779857, rs779782328, rs779782868, rs779795174, rs779800997, rs779805055, rs779814724, rs779815127, rs779817343, rs779820882, rs779826743, rs779831496, rs779834223, rs779839737, rs779845512, rs779847475, rs779858148, rs779858238, rs779863501, rs779866659, rs779873351, rs779875830, rs779877280, rs779877337, rs779877540, rs779888310, rs778760586, rs778764441, rs778773001, rs778777666, rs778778914, rs778794724, rs778797190, rs778797609, rs778800701, rs778815175, rs778818083, rs778823029, rs778834519, rs778834692, rs778841535, rs778846841, rs778855532, rs778863477, rs778868559, rs778869491, rs778869610, rs778872049, rs778872274, rs778874955, rs778888602, rs778890236, rs778892148, rs778894134, rs778895806, rs778897892, rs778900415, rs778908152, rs778913439, rs778914115, rs778916936, rs778927928, rs778934070, rs778945767, rs778952084, rs778958587, rs778964296, rs778964612, rs778967353, rs778968179, rs778968750, rs778973900, rs778985253, rs778985993, rs778987628, rs778994132, rs779007426, rs779016752, rs779028053, rs779028069, rs779029546, rs779031961, rs779043677, rs779047180, rs779057491, rs779062366, rs779085858, rs779094494, rs779102365, rs779107617, rs779116346, rs779116713, rs779116918, rs779124119, rs779126921, rs779130638, rs779133786, rs779135659, rs779149124, rs779149900, rs779155518, rs779169945, rs779178048, rs779183797, rs779186255, rs779189699, rs779193076, rs779211391, rs779217749, rs779226205, rs779235193, rs780676578, rs780686285, rs780686763, rs780687587, rs780690402, rs780691253, rs780691633, rs780695627, rs780697090, rs780697636, rs780702958, rs780707929, rs780717027, rs780718912, rs780721343, rs780723581, rs780731417, rs780734146, rs780742430, rs780745628, rs780747167, rs780747538, rs780752061, rs780754955, rs780763058, rs780764713, rs780764845, rs780766342, rs780771895, rs780773632, rs780787237, rs780789699, rs780790204, rs780794962, rs780798587, rs780802915, rs780805885, rs780806324, rs780813713, rs780825131, rs780830614, rs780831953, rs780835182, rs780841731, rs780844742, rs780844864, rs780848018, rs780849380, rs780851130, rs780852882, rs780864401, rs780866825, rs780869326, rs780877710, rs780878324, rs780884991, rs780888118, rs780888127, rs780892378, rs780911139, rs780913955, rs780917553, rs780928505, rs780946212, rs780951898, rs780953035, rs780953075, rs780970246, rs780979441, rs780982423, rs780983369, rs780985060, rs780986629, rs780988539, rs780989051, rs780992868, rs780997325, rs780998889, rs781000491, rs781001431, rs781001818, rs781002053, rs781003380, rs781008639, rs781012701, rs781024017, rs781029310, rs781053652, rs781057641, rs781060924, rs781066533, rs781069741, rs781072330, rs781072846, rs781073814, rs781073826, rs781075479, rs781078361, rs781080501, rs781087897, rs781093983, rs781103695, rs781113853, rs781116012, rs781116183, rs781117878, rs781125433, rs781126695, rs781135747, rs781138470, rs781139508, rs781139768, rs781166909, rs781168656, rs781169676, rs781174427, rs781179731, rs781190929, rs781204462, rs781214403, rs781219307, rs781223853, rs781225904, rs781226512, rs781231694, rs781239349, rs781243880, rs781250259, rs781251110, rs781253389, rs781254033, rs781258290, rs781259906, rs781260480, rs781264165, rs781265953, rs781269433, rs779888578, rs779893431, rs779899304, rs779910498, rs779917589, rs779918299, rs779920173, rs779924789, rs779925266, rs779927181, rs779932073, rs779942839, rs779959024, rs779960462, rs779964200, rs779965601, rs779975082, rs779975509, rs779976011, rs779976929, rs779978384, rs779984116, rs779988735, rs779996812, rs780000806, rs780004749, rs780012439, rs780014116, rs780015196, rs780016916, rs780017553, rs780019554, rs780019944, rs780024072, rs780030627, rs780033993, rs780034986, rs780040303, rs780044995, rs780048232, rs780049044, rs780053353, rs780053714, rs780054355, rs780054549, rs780078640, rs780089004, rs780091099, rs780096220, rs780100731, rs780101728, rs780115122, rs780127363, rs780130747, rs780139649, rs780140873, rs780142844, rs780145090, rs780149943, rs780153864, rs780154697, rs780168531, rs780171636, rs780173189, rs780175456, rs780176318, rs780190144, rs780193210, rs780194827, rs780205342, rs780207497, rs780209927, rs780215546, rs780224418, rs780224612, rs780228051, rs780240738, rs780248935, rs780250236, rs780258591, rs780261631, rs780263878, rs780270723, rs780288747, rs780291783, rs780296140, rs780306322, rs780307334, rs780311503, rs780311895, rs780316786, rs780324170, rs780326209, rs780328073, rs780329052, rs780330264, rs780330926, rs780331170, rs780332135, rs780337244, rs780339023, rs780342785, rs780346507, rs780356271, rs780362071, rs780362607, rs780362642, rs780368037, rs780368125, rs780377085, rs780377761, rs780381594, rs780385725, rs781275389, rs781279018, rs781282818, rs781286368, rs781287391, rs781290534, rs781290544, rs781293441, rs781301269, rs781306833, rs781315903, rs781316719, rs781320224, rs781334385, rs780387114, rs780400112, rs780406859, rs780410286, rs780411962, rs780415894, rs780420223, rs780422026, rs780423437, rs780426135, rs780427938, rs780430775, rs780442272, rs780444488, rs780444967, rs780451313, rs780452345, rs780453022, rs780453592, rs780461770, rs780464266, rs780468587, rs780469662, rs780471470, rs780474422, rs780480241, rs780492334, rs780496890, rs780498064, rs780499022, rs780500040, rs780536190, rs780539014, rs780539812, rs780541189, rs780541490, rs780545998, rs780554108, rs780554687, rs780566349, rs780568352, rs780577345, rs780577726, rs780581822, rs780585352, rs780589823, rs780593928, rs780597365, rs780599440, rs780609868, rs780611629, rs780622171, rs780626282, rs780629276, rs780635463, rs780643418, rs780644685, rs780645493, rs780652016, rs780661686, rs780662184, rs780669696, rs780670089, rs780670230, rs780674886, rs781708626, rs781709543, rs781716820, rs781722706, rs781727788, rs781728421, rs781728980, rs781729180, rs781729917, rs781738610, rs781744363, rs781747835, rs781750033, rs781755479, rs781766813, rs781771695, rs781772588, rs781778543, rs781339102, rs781340864, rs781341719, rs781343323, rs781345836, rs781349716, rs781360891, rs781369055, rs781371146, rs781371811, rs781372608, rs781376927, rs781379587, rs781379774, rs781382284, rs781390735, rs781393250, rs781401510, rs781402843, rs781407740, rs781409653, rs781414838, rs781417197, rs781424807, rs781462721, rs781470184, rs781473388, rs781481625, rs781485376, rs781488779, rs781493060, rs781499096, rs781500877, rs781506278, rs781509571, rs781510498, rs781511977, rs781512210, rs781514277, rs781514510, rs781521434, rs781524387, rs781531914, rs781536908, rs781542342, rs781543801, rs781546528, rs781553345, rs781562172, rs781562598, rs781671930, rs781684194, rs781685180, rs781686386, rs781688225, rs781688699, rs781692818, rs781697453, rs781699346, rs781708533, rs781580213, rs781590125, rs781596104, rs781608028, rs781611121, rs781612563, rs781616017, rs781617293, rs781618015, rs781624069, rs781627522, rs781629398, rs781632568, rs781633885, rs781638563, rs781648212, rs781648289, rs781649217, rs781658260, rs781658512, rs781662483, VAR_004168, VAR_004169, VAR_015743, VAR_015744, VAR_015745, VAR_035819, VAR_047720, and VAR_047722.

[0378] In one example, the guide RNA used in the present disclosure may comprise at least one 20 nucleotide (nt) target nucleic acid sequence listed in Table 5. Provided in Table 5 are the gene symbol and the sequence identifier of the gene (Gene SEQ ID NO), the gene sequence including 1-5 kilobase pairs upstream and/or downstream of the target gene (Extended Gene SEQ ID NO), and the 20 nt target nucleic acid sequence (20 nt Target Sequence SEQ ID NO). In the sequence listing the respective target gene, the strand for targeting the gene (noted by a (+) strand or (−) strand in the sequence listing), the associated PAM type and the PAM sequence are described for each of the 20 nt target nucleic acid sequences (SEQ ID NO: 5305-415,443). It is understood in the art that the spacer sequence, where “T” is “U,” may be an RNA sequence corresponding to the 20 nt sequences listed in Table 5.

TABLE 5
Nucleic Acid Sequences

| | | | 20 nt Target |
|---|---|---|---|
| | Gene | Extended Gene | Sequence |
| Gene Symbol | SEQ ID NO | SEQ ID NO | SEQ ID NO |
| LAMA2 | 5303 | 5304 | 5305-415,443 |

[0379] In one example, the guide RNA used in the present disclosure may comprise at least one spacer sequence that, where “T” is “U”, may be an RNA sequence corresponding to a 20 nucleotide (nt) target sequence such as, but not limited to, any of SEQ ID NO: 5305-415,443.

[0380] In one example, the guide RNA used in the present disclosure may comprise at least one spacer sequence which, where “T” is “U,” is an RNA sequence corresponding to the 20 nt sequences such as, but not limited to, any of SEQ ID NO: 5305-415,443.

[0381] In one example, a guide RNA may comprise a 20 nucleotide (nt) target nucleic acid sequence associated with the PAM type such as, but not limited to, NAAAAC, NNAGAAW, NNGRRT, NNNNGHTT, NRG, or YTN. As a non-limiting example, the 20 nt target nucleic acid sequence for a specific target gene and a specific PAM type may be, where “T” is “U,” the RNA sequence corresponding to any one of the 20 nt nucleic acid sequences in Table 6.

TABLE 6
Nucleic Acid Sequences by PAM Type

| | PAM: NAAAAC | PAM: NNAGAAW | PAM: NNGRRT | PAM: NNNNGHTT | PAM: NRG | PAM: YTN |
|---|---|---|---|---|---|---|
| | 20 nt Target | 20 nt Target | 20 nt Target | 20 nt Target | 20 nt Target | 20 nt Target |
| Gene | Nucleic Acid | Nucleic Acid | Nucleic Acid | Nucleic Acid | Nucleic Acid | Nucleic Acid |
| Symbol | SEQ ID NO | SEQ ID NO | SEQ ID NO | SEQ ID NO | SEQ ID NO | SEQ ID NO |
| LAMA2 | 5305-8387 | 8388-16107 | 16108-33793 | 33794-52292 | 52293-186932 | 186933-415443 |

[0382] In one example, a guide RNA may comprise a 20 nucleotide (nt) target nucleic acid sequence associated with the YTN PAM type. As a non-limiting example, the 20 nt target nucleic acid sequence for a specific target gene may comprise a 20 nt core sequence where the 20 nt core sequence, where “T” is “U,” may be the RNA sequence corresponding to SEQ ID NO: 186,933-415,443. As another non-limiting example, the 20 nt target nucleic acid sequence for a specific target gene may comprise a core sequence where the core sequence, where “T” is “U,” may be a fragment, segment or region of the RNA sequence corresponding to any of SEQ ID NO: 186,933-415,443.

### VI. OTHER THERAPEUTIC APPROACHES

[0383] Gene editing can be conducted using nucleases engineered to target specific sequences. To date there are four major types of nucleases: meganucleases and their derivatives, zinc finger nucleases (ZFNs), transcription activator like effector nucleases (TALENs), and CRISPR-Cas9 nuclease systems. The nuclease platforms vary in difficulty of design, targeting density and mode of action, particularly as the specificity of ZFNs and TALENs is through protein-DNA interactions, while RNA-DNA interactions primarily guide Cas9.

[0384] CRISPR endonucleases, such as Cas9, can be used in the methods of the present disclosure. However, the teachings described herein, such as therapeutic target sites, could be applied to other forms of endonucleases, such as ZFNs, TALENs, HEs, or MegaTALs, or using combinations of nucleases. However, in order to apply the teachings of the present disclosure to such endonucleases, one would need to, among other things, engineer proteins directed to the specific target sites.

[0385] Additional binding domains can be fused to the Cas9 protein to increase specificity. The target sites of these constructs would map to the identified gRNA specified site, but would require additional binding motifs, such as for a zinc finger domain. In the case of Mega-TAL, a meganuclease can be fused to a TALE DNA-binding domain. The meganuclease domain can increase specificity and provide the cleavage. Similarly, inactivated or dead Cas9 (dCas9) can be fused to a cleavage domain and require the sgRNA/Cas9 target site and adjacent binding site for the fused DNA-binding domain. This likely would require some protein engineering of the dCas9, in addition to the catalytic inactivation, to decrease binding without the additional binding site.

### Zinc Finger Nucleases

[0386] Zinc finger nucleases (ZFNs) are modular proteins comprised of an engineered zinc finger DNA binding domain linked to the catalytic domain of the type II endonuclease FokI. Because FokI functions only as a dimer, a pair of ZFNs must be engineered to bind to cognate target “half-site” sequences on opposite DNA strands and with precise spacing between them to enable the catalytically active FokI dimer to form. Upon dimerization of the FokI domain, which itself has no sequence specificity per se, a DNA double-strand break is generated between the ZFN half-sites as the initiating step in genome editing.

[0387] The DNA binding domain of each ZFN is typically comprised of 3-6 zinc fingers of the abundant Cys2-His2 architecture, with each finger primarily recognizing a triplet of nucleotides on one strand of the target DNA sequence, although cross-strand interaction with a fourth nucleotide also can be important. Alteration of the amino acids of a finger in positions that make key contacts with the DNA alters the sequence specificity of a given finger. Thus, a four-finger zinc finger protein will selectively recognize a 12 bp target sequence, where the target sequence is a composite of the triplet preferences contributed by each finger, although triplet preference can be influenced to varying degrees by neighboring fingers. An important aspect of ZFNs is that they can be readily re-targeted to almost any genomic address simply by modifying individual fingers, although considerable expertise is required to do this well. In most applications of ZFNs, proteins of 4-6 fingers are used, recognizing 12-18 bp respectively. Hence, a pair of ZFNs will typically recognize a combined target sequence of 24-36 bp, not including the typical 5-7 bp spacer between half-sites. The binding sites can be separated further with larger spacers, including 15-17 bp. A target sequence of this length is likely to be unique in the human genome, assuming repetitive sequences or gene homologs are excluded during the design process. Nevertheless, the ZFN protein-DNA interactions are not absolute in their specificity so off-target binding and cleavage events do occur, either as a heterodimer between the two ZFNs, or as a homodimer of one or the other of the ZFNs. The latter possibility has been effectively eliminated by engineering the dimerization interface of the FokI domain to create “plus” and “minus” variants, also known as obligate heterodimer variants, which can only dimerize with each other, and not with themselves. Forcing the obligate heterodimer prevents formation of the homodimer. This has greatly enhanced specificity of ZFNs, as well as any other nuclease that adopts these FokI variants.

[0388] A variety of ZFN-based systems have been described in the art, modifications thereof are regularly reported, and numerous references describe rules and parameters that are used to guide the design of ZFNs; see, e.g., Segal et al., Proc Natl Acad Sci USA 96(6):2758-63 (1999); Dreier B et al., J Mol Biol. 303(4):489-502 (2000); Liu Q et al., J Biol Chem. 277(6):3850-6 (2002); Dreier et al., J Biol Chem 280(42):35588-97 (2005); and Dreier et al., J Biol Chem.

[0389] 276(31):29466-78 (2001).

### Transcription Activator-Like Effector Nucleases (TALENs)

[0390] TALENs represent another format of modular nucleases whereby, as with ZFNs, an engineered DNA binding domain is linked to the FokI nuclease domain, and a pair of TALENs operate in tandem to achieve targeted DNA cleavage. The major difference from ZFNs is the nature of the DNA binding domain and the associated target DNA sequence recognition properties. The TALEN DNA binding domain derives from TALE proteins, which were originally described in the plant bacterial pathogen Xanthomonas sp. TALEs are comprised of tandem arrays of 33-35 amino acid repeats, with each repeat recognizing a single base pair in the target DNA sequence that is typically up to 20 bp in length, giving a total target sequence length of up to 40 bp. Nucleotide specificity of each repeat is determined by the repeat variable diresidue (RVD), which includes just two amino acids at positions 12 and 13. The bases guanine, adenine, cytosine and thymine are predominantly recognized by the four RVDs: Asn-Asn, Asn-Ile, His-Asp and Asn-Gly, respectively. This constitutes a much simpler recognition code than for zinc fingers, and thus represents an advantage over the latter for nuclease design. Nevertheless, as with ZFNs, the protein-DNA interactions of TALENs are not absolute in their specificity, and TALENs have also benefitted from the use of obligate heterodimer variants of the FokI domain to reduce off-target activity.

[0391] Additional variants of the FokI domain have been created that are deactivated in their catalytic function. If one half of either a TALEN or a ZFN pair contains an inactive FokI domain, then only single-strand DNA cleavage (nicking) will occur at the target site, rather than a DSB. The outcome is comparable to the use of CRISPR/Cas9 or CRISPR/Cpf1 “nickase” mutants in which one of the Cas9 cleavage domains has been deactivated. DNA nicks can be used to drive genome editing by HDR, but at lower efficiency than with a DSB. The main benefit is that off-target nicks are quickly and accurately repaired, unlike the DSB, which is prone to NHEJ-mediated mis-repair.

[0392] A variety of TALEN-based systems have been described in the art, and modifications thereof are regularly reported; see, e.g., Boch, Science 326(5959):1509-12 (2009); Mak et al., Science 335(6069):716-9 (2012); and Moscou et al., Science 326(5959):1501 (2009). The use of TALENs based on the “Golden Gate” platform, or cloning scheme, has been described by multiple groups; see, e.g., Cermak et al., Nucleic Acids Res. 39(12):e82 (2011); Li et al., Nucleic Acids Res. 39(14):6315-25(2011); Weber et al., PLoS One. 6(2):e16765 (2011); Wang et al., J Genet Genomics 41(6):339-47, Epub 2014 May 17 (2014); and Cermak T et al., Methods Mol Biol. 1239:133-59 (2015).

### Homing Endonucleases

[0393] Homing endonucleases (HEs) are sequence-specific endonucleases that have long recognition sequences (14-44 base pairs) and cleave DNA with high specificity—often at sites unique in the genome. There are at least six known families of HEs as classified by their structure, including LAGLIDADG (SEQ ID NO. 415,478), GIY-YIG, His-Cis box, H-N-H, PD-(D/E)xK, and Vsr-like that are derived from a broad range of hosts, including eukarya, protists, bacteria, archaea, cyanobacteria and phage. As with ZFNs and TALENs, HEs can be used to create a DSB at a target locus as the initial step in genome editing. In addition, some natural and engineered HEs cut only a single strand of DNA, thereby functioning as site-specific nickases. The large target sequence of HEs and the specificity that they offer have made them attractive candidates to create site-specific DSBs.

[0394] A variety of HE-based systems have been described in the art, and modifications thereof are regularly reported; see, e.g., the reviews by Steentoft et al., Glycobiology 24(8):663-80 (2014); Belfort and Bonocora, Methods Mol Biol. 1123:1-26 (2014); Hafez and Hausner, Genome 55(8):553-69 (2012); and references cited therein.

MegaTAL/Tev-mTALEN/MegaTev [000391] As further examples of hybrid nucleases, the MegaTAL platform and Tev-mTALEN platform use a fusion of TALE DNA binding domains and catalytically active HEs, taking advantage of both the tunable DNA binding and specificity of the TALE, as well as the cleavage sequence specificity of the HE; see, e.g., Boissel et al., NAR 42: 2591-2601 (2014); Kleinstiver et al., G3 4:1155-65 (2014); and Boissel and Scharenberg, Methods Mol. Biol. 1239: 171-96 (2015).

[0395] In a further variation, the MegaTev architecture is the fusion of a meganuclease (Mega) with the nuclease domain derived from the GIY-YIG homing endonuclease I-Teel (Tev). The two active sites are positioned ˜30 bp apart on a DNA substrate and generate two DSBs with non-compatible cohesive ends; see, e.g., Wolfs et al., NAR 42, 8816-29 (2014). It is anticipated that other combinations of existing nuclease-based approaches will evolve and be useful in achieving the targeted genome modifications described herein.

dCas9-FokI or dCpf1-FokI and Other Nucleases

[0396] Combining the structural and functional properties of the nuclease platforms described above offers a further approach to genome editing that can potentially overcome some of the inherent deficiencies. As an example, the CRISPR genome editing system typically uses a single Cas9 endonuclease to create a DSB. The specificity of targeting is driven by a 20 or 24 nucleotide sequence in the guide RNA that undergoes Watson-Crick base-pairing with the target DNA (plus an additional 2 bases in the adjacent NAG or NGG PAM sequence in the case of Cas9 from S. pyogenes). Such a sequence is long enough to be unique in the human genome, however, the specificity of the RNA/DNA interaction is not absolute, with significant promiscuity sometimes tolerated, particularly in the 5′ half of the target sequence, effectively reducing the number of bases that drive specificity. One solution to this has been to completely deactivate the Cas9 or Cpf1 catalytic function—retaining only the RNA-guided DNA binding function—and instead fusing a FokI domain to the deactivated Cas9; see, e.g., Tsai et al., Nature

[0397] Biotech 32: 569-76 (2014); and Guilinger et al., Nature Biotech. 32: 577-82 (2014). Because FokI must dimerize to become catalytically active, two guide RNAs are required to tether two FokI fusions in close proximity to form the dimer and cleave DNA. This essentially doubles the number of bases in the combined target sites, thereby increasing the stringency of targeting by CRISPR-based systems.

[0398] As further example, fusion of the TALE DNA binding domain to a catalytically active HE, such as I-TevI, takes advantage of both the tunable DNA binding and specificity of the TALE, as well as the cleavage sequence specificity of I-TevI, with the expectation that off-target cleavage can be further reduced.

### VII. KITS

[0399] The present disclosure provides kits for carrying out the methods described herein. A kit can include one or more of a genome-targeting nucleic acid, a polynucleotide encoding a genome-targeting nucleic acid, a site-directed polypeptide, a polynucleotide encoding a site-directed polypeptide, and/or any nucleic acid or proteinaceous molecule necessary to carry out the aspects of the methods described herein, or any combination thereof.

[0400] A kit can comprise: (1) a vector comprising a nucleotide sequence encoding a genome-targeting nucleic acid, (2) the site-directed polypeptide or a vector comprising a nucleotide sequence encoding the site-directed polypeptide, and (3) a reagent for reconstitution and/or dilution of the vector(s) and or polypeptide.

[0401] A kit can comprise: (1) a vector comprising (i) a nucleotide sequence encoding a genome-targeting nucleic acid, and (ii) a nucleotide sequence encoding the site-directed polypeptide; and (2) a reagent for reconstitution and/or dilution of the vector.

[0402] In any of the above kits, the kit can comprise a single-molecule guide genome-targeting nucleic acid. In any of the above kits, the kit can comprise a double-molecule genome-targeting nucleic acid. In any of the above kits, the kit can comprise two or more double-molecule guides or single-molecule guides. The kits can comprise a vector that encodes the nucleic acid targeting nucleic acid.

[0403] In any of the above kits, the kit can further comprise a polynucleotide to be inserted to effect the desired genetic modification.

[0404] Components of a kit can be in separate containers, or combined in a single container.

[0405] Any kit described above can further comprise one or more additional reagents, where such additional reagents are selected from a buffer, a buffer for introducing a polypeptide or polynucleotide into a cell, a wash buffer, a control reagent, a control vector, a control RNA polynucleotide, a reagent for in vitro production of the polypeptide from DNA, adaptors for sequencing and the like. A buffer can be a stabilization buffer, a reconstituting buffer, a diluting buffer, or the like. A kit can also comprise one or more components that can be used to facilitate or enhance the on-target binding or the cleavage of DNA by the endonuclease, or improve the specificity of targeting.

[0406] In addition to the above-mentioned components, a kit can further comprise instructions for using the components of the kit to practice the methods. The instructions for practicing the methods can be recorded on a suitable recording medium. For example, the instructions can be printed on a substrate, such as paper or plastic, etc. The instructions can be present in the kits as a package insert, in the labeling of the container of the kit or components thereof (i.e., associated with the packaging or subpackaging), etc. The instructions can be present as an electronic storage data file present on a suitable computer readable storage medium, e.g. CD-ROM, diskette, flash drive, etc. In some instances, the actual instructions are not present in the kit, but means for obtaining the instructions from a remote source (e.g. via the Internet), can be provided. An example of this case is a kit that comprises a web address where the instructions can be viewed and/or from which the instructions can be downloaded. As with the instructions, this means for obtaining the instructions can be recorded on a suitable substrate.

### VIII. METHODS, COMPOSITIONS, AND THERAPEUTICS OF THE INVENTION

[0407] Accordingly, the present disclosure relates in particular to the following non-limiting methods, compositions, and therapeutics according to the present disclosure:

[0408] In a first method, Method 1, the present disclosure provides a method for editing a LAMA2 gene in a cell by genome editing comprising: introducing into the cell one or more DNA endonucleases to effect one or more SSBs or DSBs within or near the LAMA2 gene or LAMA2 regulatory elements that results in a permanent correction of one or more mutations or replacement of one or more exons and/or introns within or near the LAMA2 gene, thereby restoring the LAMA2 protein activity.

[0409] In another method, Method 2, the present disclosure provides a method for editing a LAMA2 gene in a cell by genome editing comprising: introducing into the cell one or more DNA endonucleases to effect one or more SSBs or DSBs within or near the LAMA2 gene or LAMA2 regulatory elements that results in a permanent insertion of one or more exons and/or introns within or near the LAMA2 gene, wherein the one or more exons and/or introns comprise the corrected LAMA2 gene sequence, thereby restoring expression of the corrected LAMA2 transcript.

[0410] In another method, Method 3, the present disclosure provides an ex vivo method for treating a patient having a LAMA2 related condition or disorder comprising: editing a muscle cell or muscle precursor cell within or near a LAMA2 gene or other DNA sequences that encode regulatory elements of the LAMA2 gene; and implanting the edited muscle cell or muscle precursor cell into the patient.

[0411] In another method, Method 4, the present disclosure provides an ex vivo method for treating a patient having a LAMA2 related condition or disorder, as provided in Method 3, wherein the editing step comprises introducing into the muscle cell or muscle precursor cell one or more DNA endonucleases to effect one or more SSBs or DSBs within or near the LAMA2 gene or LAMA2 regulatory elements that results in a permanent correction of one or more mutations or replacement of one or more exons and/or introns within or near the LAMA2 gene, thereby restoring the LAMA2 protein activity.

[0412] In another method, Method 5, the present disclosure provides an ex vivo method for treating a patient having a LAMA2 related condition or disorder, as provided in Method 3, wherein the editing step comprises introducing into the muscle cell or muscle precursor cell one or more DNA endonucleases to effect one or more SSBs or DSBs within or near the LAMA2 gene or LAMA2 regulatory elements that results in a permanent insertion of one or more exons and/or introns within or near the LAMA2 gene, wherein the one or more exons and/or introns comprise the corrected LAMA2 gene sequence, thereby restoring expression of the corrected LAMA2 transcript.

[0413] In another method, Method 6, the present disclosure provides an ex vivo method for treating a patient having a LAMA2 related condition or disorder, as provided in any one of Methods 3-5, wherein the muscle cell is a skeletal muscle cell.

[0414] In another method, Method 7, the present disclosure provides an ex vivo method for treating a patient having a LAMA2 related condition or disorder, as provided in any one of Methods 3-5, wherein the muscle cell is a smooth muscle cell.

[0415] In another method, Method 8, the present disclosure provides an ex vivo method for treating a patient having a LAMA2 related condition or disorder, as provided in any one of Methods 3-5, wherein the muscle cell is a cardiac muscle cell.

[0416] In another method, Method 9, the present disclosure provides an ex vivo method for treating a patient having a LAMA2 related condition or disorder comprising: editing a patient specific iPSC within or near a LAMA2 gene or other DNA sequences that encode regulatory elements of the LAMA2 gene; differentiating the edited iPSC into a skeletal muscle cell, a smooth muscle cell, a cardiac muscle cell or a Pax7+ myocyte progenitor cell; and implanting the skeletal muscle cell, smooth muscle cell, cardiac muscle cell or Pax7+ myocyte progenitor cell into the patient.

[0417] In another method, Method 10, the present disclosure provides an ex vivo method for treating a patient having a LAMA2 related condition or disorder, as provided in Method 9, wherein the editing step comprises introducing into the iPSC one or more DNA endonucleases to effect one or more SSBs or DSBs within or near the LAMA2 gene or LAMA2 regulatory elements that results in a permanent correction of one or more mutations or replacement of one or more exons and/or introns within or near the LAMA2 gene, thereby restoring the LAMA2 protein activity.

[0418] In another method, Method 11, the present disclosure provides an ex vivo method for treating a patient having a LAMA2 related condition or disorder, as provided in Method 9, wherein the editing step comprises introducing into the iPSC one or more DNA endonucleases to effect one or more SSBs or DSBs within or near the LAMA2 gene or LAMA2 regulatory elements that results in a permanent insertion of one or more exons and/or introns within or near the LAMA2 gene, wherein the one or more exons and/or introns comprise the corrected LAMA2 gene sequence, thereby restoring expression of the corrected LAMA2 transcript.

[0419] In another method, Method 12, the present disclosure provides an ex vivo method for treating a patient having a LAMA2 related condition or disorder, as provided in any one of Methods 9-11, further comprising: creating the iPSC, wherein the creating step comprises: isolating a somatic cell from the patient; and introducing a set of pluripotency-associated genes into the somatic cell to induce the somatic cell to become the iPSC.

[0420] In another method, Method 13, the present disclosure provides an ex vivo method for treating a patient having a LAMA2 related condition or disorder, as provided in Method 12, wherein the somatic cell is a fibroblast.

[0421] In another method, Method 14, the present disclosure provides an ex vivo method for treating a patient having a LAMA2 related condition or disorder, as provided in Method 12, wherein the set of pluripotency-associated genes is one or more of the genes selected from the group consisting of: OCT4, SOX2, KLF4, Lin28, NANOG and cMYC.

[0422] In another method, Method 15, the present disclosure provides an ex vivo method for treating a patient having a LAMA2 related condition or disorder comprising: editing a mesenchymal stem cell within or near a LAMA2 gene or other DNA sequences that encode regulatory elements of the LAMA2 gene; differentiating the edited mesenchymal stem cell into a skeletal muscle cell, a smooth muscle cell, a cardiac muscle cell or a Pax7+ myocyte progenitor cell; and implanting the skeletal muscle cell, smooth muscle cell, cardiac muscle cell or Pax7+ myocyte progenitor cell into the patient.

[0423] In another method, Method 16, the present disclosure provides an ex vivo method for treating a patient having a LAMA2 related condition or disorder, as provided in Method 15, wherein the editing step comprises introducing into the mesenchymal stem cell one or more DNA endonucleases to effect one or more SSBs or DSBs within or near the LAMA2 gene or LAMA2 regulatory elements that results in a permanent correction of one or more mutations or replacement of one or more exons and/or introns within or near the LAMA2 gene, thereby restoring the LAMA2 protein activity.

[0424] In another method, Method 17, the present disclosure provides an ex vivo method for treating a patient having a LAMA2 related condition or disorder, as provided in Method 15, wherein the editing step comprises introducing into the mesenchymal stem cell one or more DNA endonucleases to effect one or more SSBs or DSBs within or near the LAMA2 gene or LAMA2 regulatory elements that results in a permanent insertion of one or more exons and/or introns within or near the LAMA2 gene, wherein the one or more exons and/or introns comprise the corrected LAMA2 gene sequence, thereby restoring expression of the corrected LAMA2 transcript.

[0425] In another method, Method 18, the present disclosure provides an ex vivo method for treating a patient having a LAMA2 related condition or disorder, as provided in any one of Methods 15-17, further comprising: isolating the mesenchymal stem cell from the patient, wherein the mesenchymal stem cell is isolated from the patient's bone marrow or peripheral blood.

[0426] In another method, Method 19, the present disclosure provides an ex vivo method for treating a patient having a LAMA2 related condition or disorder, as provided in Method 18, wherein the isolating step comprises: aspiration of bone marrow and isolation of mesenchymal cells using density gradient centrifugation media.

[0427] In another method, Method 20, the present disclosure provides an in vivo method for treating a patient with a LAMA2 related condition or disorder comprising: editing the LAMA2 gene in a cell of the patient.

[0428] In another method, Method 21, the present disclosure provides an in vivo method for treating a patient with a LAMA2 related condition or disorder, as provided in Method 20, wherein the editing step comprises: introducing into the cell one or more DNA endonucleases to effect one or more SSBs or DSBs within or near the LAMA2 gene or LAMA2 regulatory elements that results in a permanent correction of one or more mutations or replacement of one or more exons and/or introns within or near the LAMA2 gene, thereby restoring the LAMA2 protein activity.

[0429] In another method, Method 22, the present disclosure provides an in vivo method for treating a patient with a LAMA2 related condition or disorder, as provided in Method 20, wherein the editing step comprises: introducing into the cell one or more DNA endonucleases to effect one or more SSBs or DSBs within or near the LAMA2 gene or LAMA2 regulatory elements that results in a permanent insertion of one or more exons and/or introns within or near the LAMA2 gene, wherein the one or more exons and/or introns comprise the corrected LAMA2 gene sequence, thereby restoring expression of the corrected LAMA2 transcript.

[0430] In another method, Method 23, the present disclosure provides an in vivo method for treating a patient with a LAMA2 related condition or disorder, as provided in any one of Methods 20-22, wherein the cell is a muscle cell or muscle precursor cell.

[0431] In another method, Method 24, the present disclosure provides an in vivo method for treating a patient with a LAMA2 related condition or disorder, as provided in Method 23, wherein the muscle cell is a skeletal muscle cell.

[0432] In another method, Method 25, the present disclosure provides an in vivo method for treating a patient with a LAMA2 related condition or disorder, as provided in Method 23, wherein the muscle cell is a smooth muscle cell.

[0433] In another method, Method 26, the present disclosure provides an in vivo method for treating a patient with a LAMA2 related condition or disorder, as provided in Method 23, wherein the muscle cell is a cardiac muscle cell.

[0434] In another method, Method 27, the present disclosure provides an in vivo method for treating a patient with a LAMA2 related condition or disorder, as provided in any one of Methods 23-26, wherein the one or more DNA endonuclease is delivered to the muscle cell or muscle precursor cell by local injection into the desired muscle.

[0435] In another method, Method 28, the present disclosure provides a method for treating a patient with a LAMA2 related condition or disorder, as provided in any one of Methods 3, 9, 15, or 20, wherein the LAMA2 related condition or disorder is MDCMD.

[0436] In another method, Method 29, the present disclosure provides a method of altering the contiguous genomic sequence of a LAMA2 gene in a cell comprising: contacting the cell with one or more DNA endonuclease to effect one or more SSBs or DSBs.

[0437] In another method, Method 30, the present disclosure provides a method of altering the contiguous genomic sequence of a LAMA2 gene in a cell, as provided in Method 29, wherein the alteration of the contiguous genomic sequence occurs in exon 1, intron 1, exon 2, intron 2, exon 3, intron 3, exon 4, intron 4, exon 5, intron 5, exon 6, intron 6, exon 7, intron 7, exon 8, intron 8, exon 9, intron 9, exon 10, intron 10, exon 11, intron 11, exon 12, intron 12, exon 13, intron 13, exon 14, intron 14, exon 15, intron 15, exon 16, intron 16, exon 17, intron 17, exon 18, intron 18, exon 19, intron 19, exon 20, intron 20, exon 21, intron 21, exon 22, intron 22, exon 23, intron 23, exon 24, intron 24, exon 25, intron 25, exon 26, intron 26, exon 27, intron 27, exon 28, intron 28, exon 29, intron 29, exon 30, intron 30, exon 31, intron 31, exon 32, intron 32, exon 33, intron 33, exon 34, intron 34, exon 35, intron 35, exon 36, intron 36, exon 37, intron 37, exon 38, intron 38, exon 39, intron 39, exon 40, intron 40, exon 41, intron 41, exon 42, intron 42, exon 43, intron 43, exon 44, intron 44, exon 45, intron 45, exon 46, intron 46, exon 47, intron 47, exon 48, intron 48, exon 49, intron 49, exon 50, intron 50, exon 51, intron 51, exon 52, intron 52, exon 53, intron 53, exon 54, intron 54, exon 55, intron 55, exon 56, intron 56, exon 57, intron 57, exon 58, intron 58, exon 59, intron 59, exon 60, intron 60, exon 61, intron 61, exon 62, intron 62, exon 63, intron 63, exon 64, intron 64, or exon 65 of the LAMA2 gene.

[0438] In another method, Method 31, the present disclosure provides a method of altering the contiguous genomic sequence of a LAMA2 gene in a cell, as provided in Method 30, wherein the alteration results in a permanent correction of one or more mutations or replacement of one or more exons and/or introns within or near the LAMA2 gene, thereby restoring the LAMA2 protein activity

[0439] In another method, Method 32, the present disclosure provides a method of altering the contiguous genomic sequence of a LAMA2 gene in a cell, as provided in Method 30, wherein the alteration results in a permanent insertion of one or more exons and/or introns of the LAMA2 gene, wherein the one or more exons and/or introns comprise the corrected LAMA2 gene sequence, thereby restoring expression of the corrected LAMA2 transcript.

[0440] In another method, Method 33, the present disclosure provides a method, as provided in any one of Methods 1-32, wherein the one or more DNA endonuclease is selected from any of those sequences in SEQ ID NOs: 1-620 and variants having at least 90% homology to any of those sequences disclosed in SEQ ID NOs: 1-620.

[0441] In another method, Method 34, the present disclosure provides a method, as provided in Method 33, wherein the one or more DNA endonuclease is one or more proteins or polypeptides.

[0442] In another method, Method 35, the present disclosure provides a method, as provided in Method 34, wherein the one or more proteins or polypeptides is flanked at the N-terminus, the C-terminus, or both the N-terminus and C-terminus by one or more NLSs.

[0443] In another method, Method 36, the present disclosure provides a method, as provided in Method 35, wherein the one or more proteins or polypeptides is flanked by two NLSs, one NLS located at the N-terminus and the second NLS located at the C-terminus.

[0444] In another method, Method 37, the present disclosure provides a method, as provided in any one of Methods 35 or 36, wherein the one or more NLSs is a SV40 NLS.

[0445] In another method, Method 38, the present disclosure provides a method, as provided in Method 33, wherein the one or more DNA endonuclease is one or more polynucleotide encoding the one or more DNA endonuclease.

[0446] In another method, Method 39, the present disclosure provides a method, as provided in Method 38, wherein the one or more DNA endonuclease is one or more RNA encoding the one or more DNA endonuclease.

[0447] In another method, Method 40, the present disclosure provides a method, as provided in Method 39, wherein the one or more RNA is one or more chemically modified RNA.

[0448] In another method, Method 41, the present disclosure provides a method, as provided in Method 40, wherein the one or more RNA is chemically modified in the coding region.

[0449] In another method, Method 42, the present disclosure provides a method, as provided in any one of Methods 38-41, wherein the one or more polynucleotide or one or more RNA is codon optimized.

[0450] In another method, Method 43, the present disclosure provides a method, as provided in any one of Methods 1-42, wherein the method further comprises introducing into the cell one or more gRNA or one or more sgRNA.

[0451] In another method, Method 44, the present disclosure provides a method, as provided in Method 43, wherein the one or more gRNA or one or more sgRNA is chemically modified.

[0452] In another method, Method 45, the present disclosure provides a method, as provided in Method 44, wherein the one or more modified sgRNAs comprises three 2′-O-methyl-phosphorothioate residues at or near each of its 5′ and 3′ ends.

[0453] In another method, Method 46, the present disclosure provides a method, as provided in any one of Methods 43-45, wherein the one or more gRNA or one or more sgRNA comprises a spacer sequence that is complementary to a DNA sequence within or near exon 1, intron 1, exon 2, intron 2, exon 3, intron 3, exon 4, intron 4, exon 5, intron 5, exon 6, intron 6, exon 7, intron 7, exon 8, intron 8, exon 9, intron 9, exon 10, intron 10, exon 11, intron 11, exon 12, intron 12, exon 13, intron 13, exon 14, intron 14, exon 15, intron 15, exon 16, intron 16, exon 17, intron 17, exon 18, intron 18, exon 19, intron 19, exon 20, intron 20, exon 21, intron 21, exon 22, intron 22, exon 23, intron 23, exon 24, intron 24, exon 25, intron 25, exon 26, intron 26, exon 27, intron 27, exon 28, intron 28, exon 29, intron 29, exon 30, intron 30, exon 31, intron 31, exon 32, intron 32, exon 33, intron 33, exon 34, intron 34, exon 35, intron 35, exon 36, intron 36, exon 37, intron 37, exon 38, intron 38, exon 39, intron 39, exon 40, intron 40, exon 41, intron 41, exon 42, intron 42, exon 43, intron 43, exon 44, intron 44, exon 45, intron 45, exon 46, intron 46, exon 47, intron 47, exon 48, intron 48, exon 49, intron 49, exon 50, intron 50, exon 51, intron 51, exon 52, intron 52, exon 53, intron 53, exon 54, intron 54, exon 55, intron 55, exon 56, intron 56, exon 57, intron 57, exon 58, intron 58, exon 59, intron 59, exon 60, intron 60, exon 61, intron 61, exon 62, intron 62, exon 63, intron 63, exon 64, intron 64, or exon 65 of the LAMA2 gene.

[0454] In another method, Method 47, the present disclosure provides a method, as provided in any one of Methods 43-46, wherein the one or more gRNA or one or more sgRNA is pre-complexed with the one or more DNA endonuclease to form one or more RNPs.

[0455] In another method, Method 48, the present disclosure provides a method, as provided in Method 47, wherein the pre-complexing involves a covalent attachment of the one or more gRNA or one or more sgRNA to the one or more DNA endonuclease.

[0456] In another method, Method 49, the present disclosure provides a method, as provided in any one of Methods 47 or 48, wherein the weight ratio of sgRNA to DNA endonuclease in the RNP is 1:1.

[0457] In another method, Method 50, the present disclosure provides a method, as provided in any one of Methods 33-49, wherein the one or more DNA endonuclease is formulated in a liposome or lipid nanoparticle.

[0458] In another method, Method 51, the present disclosure provides a method, as provided in any one of Methods 43-49, wherein the one or more DNA endonuclease is formulated in a liposome or lipid nanoparticle which also comprises the one or more gRNA or one or more sgRNA.

[0459] In another method, Method 52, the present disclosure provides a method, as provided in any one of Methods 33, or 43-46, wherein the one or more DNA endonuclease is encoded in an AAV vector particle.

[0460] In another method, Method 53, the present disclosure provides a method, as provided in Method 43, wherein the one or more gRNA or one or more sgRNA is encoded in an AAV vector particle.

[0461] In another method, Method 54, the present disclosure provides a method, as provided in Method 53, wherein the one or more DNA endonuclease is encoded in an AAV vector particle which also encodes the one or more gRNA or one or more sgRNA.

[0462] In another method, Method 55, the present disclosure provides a method, as provided in any one of Methods 53 or 54, wherein the AAV vector particle is selected from the group consisting of any of those sequences disclosed in SEQ ID NOs: 4734-5302 and Table 2.

[0463] In another method, Method 56, the present disclosure provides a method, as provided in any one of Methods 1-55, wherein the method further comprises: introducing into the cell a donor template comprising at least a portion of the wild-type or corrected LAMA2 gene.

[0464] In another method, Method 57, the present disclosure provides a method, as provided in Method 56, wherein the at least a portion of the wild-type or corrected LAMA2 gene comprises one or more sequences selected from the group consisting of a LAMA2 exon, a LAMA2 intron, and a sequence comprising an exon:intron junction of LAMA2.

[0465] In another method, Method 58, the present disclosure provides a method, as provided in any one of Methods 56 or 57, wherein the donor template comprises homologous arms to the genomic locus of the LAMA2 gene.

[0466] In another method, Method 59, the present disclosure provides a method, as provided in any one of Methods 56-58, wherein the donor template is either a single or double stranded polynucleotide.

[0467] In another method, Method 60, the present disclosure provides a method, as provided in any one of Methods 56-59, wherein the donor template is encoded in an AAV vector particle, wherein the AAV vector particle is selected from the group consisting of any of those sequences disclosed in SEQ ID NOs: 4734-5302 and Table 2.

[0468] In another method, Method 61, the present disclosure provides a method, as provided in any one of Methods 56-59, wherein the one or more polynucleotide encoding one or more DNA endonuclease is formulated into a lipid nanoparticle, and the one or more gRNA or one or more sgRNA is delivered to the cell ex vivo by electroporation and the donor template is delivered to the cell by an AAV vector.

[0469] In another method, Method 62, the present disclosure provides a method, as provided in any one of Methods 56-59, wherein the one or more polynucleotide encoding one or more DNA endonuclease is formulated into a liposome or lipid nanoparticle which also comprises the one or more gRNA or one or more sgRNA and the donor template.

[0470] In another method, Method 63, the present disclosure provides a method, as provided in any one of Methods 1-62, wherein the LAMA2 gene is located on Chromosome 6: 128,883,141-129,516,563 (Genome Reference Consortium—GRCh38).

[0471] In a first composition, Composition 1, the present disclosure provides a single-molecule guide RNA comprising at least a spacer sequence that is an RNA sequence corresponding to any one of SEQ ID NOs: 5305-415,443.

[0472] In another composition, Composition 2, the present disclosure provides the single-molecule guide RNA of Composition 1, wherein the single-molecule guide RNA further comprises a spacer extension region.

[0473] In another composition, Composition 3, the present disclosure provides the single-molecule guide RNA of Composition 1, wherein the single-molecule guide RNA further comprises a tracrRNA extension region.

[0474] In another composition, Composition 4, the present disclosure provides the single-molecule guide RNA of any one of Compositions 1-3, wherein the single-molecule guide RNA is chemically modified.

[0475] In another composition, Composition 5, the present disclosure provides the single-molecule guide RNA of any one of Compositions 1-4, wherein the single-molecule guide RNA is pre-complexed with a DNA endonuclease.

[0476] In another composition, Composition 6, the present disclosure provides the single-molecule guide RNA of Composition 5, wherein the DNA endonuclease is a Cas9 or Cpf1 endonuclease.

[0477] In another composition, Composition 7, the present disclosure provides the single-molecule guide RNA of Composition 6, wherein the Cas9 or Cpf1 endonuclease is selected from the group consisting of: S. pyogenes Cas9, S. aureus Cas9, N. meningitidis Cas9, S. thermophilus CRISPR1 Cas9, S. thermophilus CRISPR 3 Cas9, T. denticola Cas9, L. bacterium ND2006 Cpf1 and Acidaminococcus sp. BV3L6 Cpf1, and variants having at least 90% homology to the endonucleases.

[0478] In another composition, Composition 8, the present disclosure provides the single-molecule guide RNA of Composition 7, wherein the Cas9 or Cpf1 endonuclease comprises one or more NLSs.

[0479] In another composition, Composition 9, the present disclosure provides the single-molecule guide RNA of Composition 8, wherein at least one NLS is at or within 50 amino acids of the amino-terminus of the Cas9 or Cpf1 endonuclease and/or at least one NLS is at or within 50 amino acids of the carboxy-terminus of the Cas9 or Cpf1 endonuclease.

[0480] In another composition, Composition 10, the present disclosure provides a DNA encoding the single-molecule guide RNA of any one of Compositions 1-4.

[0481] In a first therapeutic, Therapeutic 1, the present disclosure provides a therapeutic comprising at least one or more gRNAs for editing a LAMA2 gene in a cell from a patient with a LAMA2 related condition or disorder, the one or more gRNAs comprising a spacer sequence selected from the group consisting of nucleic acid sequences in any one of SEQ ID NOs: 5305-415,443 of the Sequence Listing.

[0482] In another therapeutic, Therapeutic 2, the present disclosure provides a therapeutic for treating a patient with an LAMA2 related condition or disorder formed by the method comprising: introducing one or more DNA endonucleases; introducing one or more gRNA or one or more sgRNA for editing a LAMA2 gene; wherein the one or more gRNAs or sgRNAs comprise a spacer sequence selected from the group consisting of nucleic acid sequences in SEQ ID NOs: 5305-415,443 of the Sequence Listing.

[0483] In another therapeutic, Therapeutic 3, the present disclosure provides the therapeutic of any one of Therapeutics 1 or 2, wherein the LAMA2 related condition or disorder is MDCMD.

### IX. DEFINITIONS

[0484] In addition to the definitions previously set forth herein, the following definitions are relevant to the present disclosure:

[0485] The term “comprising” or “comprises” is used in reference to compositions, methods, therapeutics, and respective component(s) thereof, that are essential to the present disclosure, yet open to the inclusion of unspecified elements, whether essential or not.

[0486] The term “consisting essentially of” refers to those elements required for a given aspect. The term permits the presence of additional elements that do not materially affect the basic and novel or functional characteristic(s) of that aspect of the present disclosure.

[0487] The term “consisting of” refers to compositions, methods, therapeutics and respective components thereof as described herein, which are exclusive of any element not recited in that description of the aspect.

[0488] The singular forms “a,” “an,” and “the” include plural references, unless the context clearly dictates otherwise.

[0489] Any numerical range recited in this specification describes all sub-ranges of the same numerical precision (i.e., having the same number of specified digits) subsumed within the recited range. For example, a recited range of “1.0 to 10.0” describes all sub-ranges between (and including) the recited minimum value of 1.0 and the recited maximum value of 10.0, such as, for example, “2.4 to 7.6,” even if the range of “2.4 to 7.6” is not expressly recited in the text of the specification. Accordingly, the Applicant reserves the right to amend this specification, including the claims, to expressly recite any sub-range of the same numerical precision subsumed within the ranges expressly recited in this specification. All such ranges are inherently described in this specification such that amending to expressly recite any such sub-ranges will comply with written description, sufficiency of description, and added matter requirements, including the requirements under 35 U.S.C. § 112(a) and Article 123(2) EPC. Also, unless expressly specified or otherwise required by context, all numerical parameters described in this specification (such as those expressing values, ranges, amounts, percentages, and the like) may be read as if prefaced by the word “about,” even if the word “about” does not expressly appear before a number. Additionally, numerical parameters described in this specification should be construed in light of the number of reported significant digits, numerical precision, and by applying ordinary rounding techniques. It is also understood that numerical parameters described in this specification will necessarily possess the inherent variability characteristic of the underlying measurement techniques used to determine the numerical value of the parameter.

[0490] The details of one or more aspects of the present disclosure are set forth in the accompanying description below. Although any materials and methods similar or equivalent to those described herein can be used in the practice or testing of the present disclosure, the preferred materials and methods are now described. Other features, objects and advantages of the present disclosure will be apparent from the description. In the description, the singular forms also include the plural unless the context clearly dictates otherwise. Unless defined otherwise, all technical and scientific terms used herein have the same meaning as commonly understood by one of ordinary skill in the art to which this present disclosure belongs. In the case of conflict, the present description will control.

[0491] The present disclosure is further illustrated by the following non-limiting examples.

### X. EXAMPLES

[0492] The present disclosure will be more fully understood by reference to the following examples, which provide illustrative non-limiting aspects of the present disclosure.

[0493] The examples describe the use of the CRISPR system as an illustrative genome editing technique to create defined therapeutic genomic deletions, insertions, or replacements, termed “genomic modifications” herein, in the LAMA2 gene that lead to permanent correction of mutations in the genomic locus, or expression at a heterologous locus, that restore LAMA2 protein activity. Introduction of the defined therapeutic modifications represents a novel therapeutic strategy for the potential amelioration of Merosin-Deficient Congenital Muscular Dystrophy (MDCMD), as described and illustrated herein.

[0494] Example 1—CRISPR/S. pyogenes(Sp)Cas9 Target Sites for the LAMA2 Gene

[0495] Regions of the LAMA2 gene were scanned for target sites. Each area was scanned for a protospacer adjacent motif (PAM) having the sequence NRG. gRNA 20 bp spacer sequences corresponding to the PAM were then identified, as shown in SEQ ID NOs: 52,293-186,932 of the Sequence Listing.

[0496] Example 2—CRISPR/S. aureus(Sa)Cas9 Target Sites for the LAMA2 Gene

[0497] Regions of the LAMA2 gene were scanned for target sites. Each area was scanned for a protospacer adjacent motif (PAM) having the sequence NNGRRT. gRNA 20 bp spacer sequences corresponding to the PAM were then identified, as shown in SEQ ID NOs: 16,108-33,793 of the Sequence Listing.

[0498] Example 3—CRISPR/S. thermophilus(St)Cas9 Target Sites for the LAMA2 Gene

[0499] Regions of the LAMA2 gene were scanned for target sites. Each area was scanned for a protospacer adjacent motif (PAM) having the sequence NNAGAAW. gRNA 20 bp spacer sequences corresponding to the PAM were then identified, as shown in SEQ ID NOs: 8388-16,107 of the Sequence Listing.

[0500] Example 4—CRISPR/T. denticola(Td)Cas9 Target Sites for the LAMA2 Gene

[0501] Regions of the LAMA2 gene were scanned for target sites. Each area was scanned for a protospacer adjacent motif (PAM) having the sequence NAAAAC. gRNA 20 bp spacer sequences corresponding to the PAM were then identified, as shown in SEQ ID NOs: 5305-8387 of the Sequence Listing.

[0502] Example 5—CRISPR/N. meningitidis(Nm)Cas9 Target Sites for the LAMA2 Gene

[0503] Regions of the LAMA2 gene were scanned for target sites. Each area was scanned for a protospacer adjacent motif (PAM) having the sequence NNNNGHTT. gRNA 20 bp spacer sequences corresponding to the PAM were then identified, as shown in SEQ ID NOs: 33,794-52,292 of the Sequence Listing.

[0504] Example 6—CRISPR/Cpf1 Target Sites for the LAMA2 Gene

[0505] Regions of the LAMA2 gene were scanned for target sites. Each area was scanned for a protospacer adjacent motif (PAM) having the sequence TTN or YTN. gRNA 20 bp spacer sequences corresponding to the PAM were then identified, as shown in SEQ ID NOs: 186,933-415,443 of the Sequence Listing.

[0506] Example 7—Bioinformatics Analysis of the Guide Strands

[0507] Candidate guides were then screened and selected in a single process or multi-step process that involves both theoretical binding and experimentally assessed activity at both on-target and off-target sites. By way of illustration, candidate guides having sequences that match a particular on-target site, such as a site within the LAMA2 gene, with adjacent PAM can be assessed for their potential to cleave at off-target sites having similar sequences, using one or more of a variety of bioinformatics tools available for assessing off-target binding, as described and illustrated in more detail below, in order to assess the likelihood of effects at chromosomal positions other than those intended.

[0508] Candidates predicted to have relatively lower potential for off-target activity can then be assessed experimentally to measure their on-target activity, and then off-target activities at various sites. Preferred guides have sufficiently high on-target activity to achieve desired levels of gene editing at the selected locus, and relatively lower off-target activity to reduce the likelihood of alterations at other chromosomal loci. The ratio of on-target to off-target activity is often referred to as the “specificity” of a guide.

[0509] For initial screening of predicted off-target activities, there are a number of bioinformatics tools known and publicly available that can be used to predict the most likely off-target sites; and since binding to target sites in the CRISPR/Cas9 or CRISPR/Cpf1 nuclease system is driven by Watson-Crick base pairing between complementary sequences, the degree of dissimilarity (and therefore reduced potential for off-target binding) is essentially related to primary sequence differences: mismatches and bulges, i.e. bases that are changed to a non-complementary base, and insertions or deletions of bases in the potential off-target site relative to the target site. An exemplary bioinformatics tool called COSMID (CRISPR Off-target Sites with Mismatches, Insertions and Deletions) (available on the web at crispr.bme.gatech.edu) compiles such similarities. Other bioinformatics tools include, but are not limited to, autoCOSMID, and CCtop.

[0510] Bioinformatics was used to minimize off-target cleavage in order to reduce the detrimental effects of mutations and chromosomal rearrangements. Studies on CRISPR/Cas9 systems suggested the possibility of off-target activity due to non-specific hybridization of the guide strand to DNA sequences with base pair mismatches and/or bulges, particularly at positions distal from the PAM region. Therefore, it is important to have a bioinformatics tool that can identify potential off-target sites that have insertions and/or deletions between the RNA guide strand and genomic sequences, in addition to base-pair mismatches. Bioinformatics tools based upon the off-target algorithm CCTop were used to search genomes for potential CRISPR off-target sites (CCTop is available on the web at crispr.cos.uni-heidelberg.de/). The output ranked lists of the potential off-target sites based on the number and location of mismatches, allowing more informed choice of target sites, and avoiding the use of sites with more likely off-target cleavage.

[0511] Additional bioinformatics pipelines were employed that weigh the estimated on- and/or off-target activity of gRNA targeting sites in a region. Other features that may be used to predict activity include information about the cell type in question, DNA accessibility, chromatin state, transcription factor binding sites, transcription factor binding data, and other CHIP-seq data. Additional factors are weighed that predict editing efficiency, such as relative positions and directions of pairs of gRNAs, local sequence features and micro-homologies.

[0512] Initial evaluation and screening of CRISPR/Cas9 target sites focused on the region upstream, downstream, and within intron 34 of the LAMA2 gene. gRNAs targeting the upstream region of intron 34, downstream region of intron 34, and intron 34 sequence can be used to insert one or more exons and introns within or near the LAMA2 gene and restore LAMA2 protein expression. This allows for the correction of mutations in the 3′half (or last 4 KB) of the LAMA2 gene.

[0513] Initial bioinformatics analysis identified 1046 gRNAs targeting the region upstream, downstream, and within intron 34 of the LAMA2 gene. Further analysis of predicted off-target sites and evaluation of the gRNA target site within the LAMA2 gene identified 48 gRNAs, of these 22 gRNAs were selected for screening. The prioritized list of 22 single gRNAs targeting the LAMA gene were tested for cutting efficiencies using SpCas9 (Table 7).

TABLE 7

| SEQ ID NO. | Name | Sequence |
|---|---|---|
| 102748 | LAMA2_Int34_T12 | AAGTGGACTCGATAATCCCC |
| 170573 | LAMA2_Int34_T110 | CGGTTTAGGAAAATATCCAC |
| 103379 | LAMA2_Int34_T44 | GAGATGTCCAATCCATAGTA |
| 103570 | LAMA2_Int34_T104 | GAACCCCTGCGATGGCACAG |
| 103354 | LAMA2_Int34_T72 | CAAGGAACACCGACTTTGAA |
| 170530 | LAMA2_Int34_T40 | ACATAAAGCCCGCCATCTTG |
| 103505 | LAMA2_Int34_T21 | CATTCATTCTGGCTACGTTA |
| 170571 | LAMA2_Int34_T22 | ACATAGCCTGCTGTCGGTTT |
| 171012 | LAMA2_Int34_T34 | TGGTCCTATGTGCCTTACTA |
| 170498 | LAMA2_Int34_T16 | ACTTTATTCAGTAGCCTCCG |
| 103438 | LAMA2_Int34_T142 | AGCAGAGATTAGATCATGGT |
| 171059 | LAMA2_Int34_T9 | CTGACTTCCCTTAGGCTCGT |
| 171002 | LAMA2_Int34_T86 | CTTCAAAGTCGGTGTTCCTT |
| 171071 | LAMA2_Int34_T38 | AAAGCCCTCTGTGCCATCGC |
| 103457 | LAMA2_Int34_T4 | CTTATACCCTCAATCCGTAG |
| 171047 | LAMA2_Int34_T139 | TGGGCTTCCACTTGTGTGTA |
| 171003 | LAMA2_Int34_T78 | TTCAAAGTCGGTGTTCCTTG |
| 103517 | LAMA2_Int34_T11 | TCTTTATCCTACGAGCCTAA |
| 103391 | LAMA2_Int34_T129 | AACACTGAGATGTTCTACAC |
| 170505 | LAMA2_Int34_T51 | TGGTCTCTTTCATCTCATCG |
| 103355 | LAMA2_Int34_T24 | CCAAGGAACACCGACTTTGA |
| 103508 | LAMA2_Int34_T14 | TGCGATGACGTATTCACATT |

[0514] Note that the SEQ ID NOs represent the DNA sequence of the genomic target, while the gRNA or sgRNA spacer sequence will be the RNA version of the DNA sequence.

[0515] Example 8—Testing of Preferred Guides in In Vitro Transcribed (IVT) gRNA Screen

[0516] To identify a large spectrum of pairs of gRNAs able to edit the cognate DNA target region, an in vitro transcribed (IVT) gRNA screen was conducted. The relevant genomic sequence was submitted for analysis using a gRNA design software. The resulting list of gRNAs was narrowed to a select list of gRNAs as described above based on uniqueness of sequence (only gRNAs without a perfect match somewhere else in the genome were screened) and minimal predicted off targets. This set of gRNAs was in vitro transcribed, and transfected using Lipofectamine MessengerMAX into HEK293T cells that constitutively express Cas9. Cells were harvested 48 hours post transfection, the genomic DNA was isolated, and cutting efficiency was evaluated using TIDE analysis. (FIGS. 2-3).

[0517] The gRNA or pairs of gRNA with significant activity can then be followed up in cultured cells to measure correction of the LAMA2 mutation. Off-target events can be followed again. A variety of cells can be transfected and the level of gene correction and possible off-target events measured. These experiments allow optimization of nuclease and donor design and delivery.

[0518] Example 9—Testing of Preferred Guides in Cells for Off-Target Activity

[0519] The gRNAs having the best on-target activity from the IVT screen in the above example are tested for off-target activity using Hybrid capture assays, GUIDE Seq. and whole genome sequencing in addition to other methods.

[0520] Example 10—Testing Different Approaches for HDR Gene Editing

[0521] After testing the gRNAs for both on-target activity and off-target activity, the various strategies will be tested for HDR gene editing.

[0522] For the second and third editing stratigies, donor DNA template will be provided as a short single-stranded oligonucleotide, a short double-stranded oligonucleotide (PAM sequence intact/PAM sequence mutated), a long single-stranded DNA molecule (PAM sequence intact/PAM sequence mutated) or a long double-stranded DNA molecule (PAM sequence intact/PAM sequence mutated). In addition, the donor DNA template will be delivered by AAV or other viral vector.

[0523] For the first editing strategy, a single-stranded or double-stranded DNA having homologous arms to the LAMA2 chromosomal region may include more than 40 nt of the first exon of the LAMA2 gene, the complete CDS of the LAMA2 gene and 3′ UTR of the LAMA2 gene, and at least 40 nt of the following intron. The single-stranded or double-stranded DNA having homologous arms to the LAMA2 chromosomal region may include more than 80 nt of the first exon of the LAMA2 gene, the complete CDS of the LAMA2 gene and 3′ UTR of the LAMA2 gene, and at least 80 nt of the following intron. The single-stranded or double-stranded DNA having homologous arms to the LAMA2 chromosomal region may include more than 100 nt of the first exon of the LAMA2 gene, the complete CDS of the LAMA2 gene and 3′ UTR of the LAMA2 gene, and at least 100 nt of the following intron. The single-stranded or double-stranded DNA having homologous arms to the LAMA2 chromosomal region may include more than 150 nt of the first exon of the LAMA2 gene, the complete CDS of the LAMA2 gene and 3′ UTR of the LAMA2 gene, and at least 150 nt of the following intron. The single-stranded or double-stranded DNA having homologous arms to the LAMA2 chromosomal region may include more than 300 nt of the first exon of the LAMA2 gene, the complete CDS of the LAMA2 gene and 3′ UTR of the LAMA2 gene, and at least 300 nt of the following intron. The single-stranded or double-stranded DNA having homologous arms to the LAMA2 chromosomal region may include more than 400 nt of the first exon of the LAMA2 gene, the complete CDS of the LAMA2 gene and 3′ UTR of the LAMA2 gene, and at least 400 nt of the following intron.

[0524] An alternate strategy can include, a single-stranded or double-stranded DNA having homologous arms to the LAMA2 chromosomal region, which may include more than 40 nt intron 34 of the LAMA2 gene, the mini gene containing the cDNA from exon 35 to the stop codon of the LAMA2 gene and 3′ UTR of the LAMA2 gene, and at least 40 nt of the 3′ UTR. The single-stranded or double-stranded DNA having homologous arms to the LAMA2 chromosomal region may include more than 80 nt intron 34 of the LAMA2 gene, the mini gene containing the cDNA from exon 35 to the stop codon of the LAMA2 gene and 3′ UTR of the LAMA2 gene, and at least 80 nt of the 3′ UTR. The single-stranded or double-stranded DNA having homologous arms to the LAMA2 chromosomal region may include more than 100 nt intron 34 of the LAMA2 gene, the mini gene containing the cDNA from exon 35 to the stop codon of the LAMA2 gene and 3′ UTR of the LAMA2 gene, and at least 100 nt of the 3′ UTR. The single-stranded or double-stranded DNA having homologous arms to the LAMA2 chromosomal region may include more than 150 nt intron 34 of the LAMA2 gene, the mini gene containing the cDNA from exon 35 to the stop codon of the LAMA2 gene and 3′ UTR of the LAMA2 gene, and at least 150 nt of the 3′ UTR. The single-stranded or double-stranded DNA having homologous arms to the LAMA2 chromosomal region may include more than 300 nt intron 34 of the LAMA2 gene, the mini gene containing the cDNA from exon 35 to the stop codon of the LAMA2 gene and 3′ UTR of the LAMA2 gene, and at least 300 nt of the 3′ UTR. The single-stranded or double-stranded DNA having homologous arms to the LAMA2 chromosomal region may include more than 400 nt intron 34 of the LAMA2 gene, the mini gene containing the cDNA from exon 35 to the stop codon of the LAMA2 gene and 3′ UTR of the LAMA2 gene, and at least 400 nt of the 3′ UTR.

[0525] Alternatively, the DNA template will be delivered by a recombinant AAV particle, or other viral vector, such as those taught herein.

[0526] A knock-in of LAMA2 gene or cDNA can be performed into any selected chromosomal location or in a safe harbor locus, e.g., AAVS1 (intron 1 of PPP1R12C), HPRT, H11, hRosa26 and/or F-A region. Assessment of efficiency of HDR mediated knock-in of cDNA into the first exon can utilize cDNA knock-in into safe harbor loci such as: single-stranded or double-stranded DNA having homologous arms to one of the following regions, for example: exon 1, intron 1, or exon 2 PPP1R12C; exon 1, intron 1, or exon 2 HPRT, and/or exon 1, intron 1, or exon 2 of hRosa26; 5′UTR correspondent to LAMA2 or alternative 5′ UTR, complete CDS of LAMA2 and 3′ UTR of LAMA2 or modified 3′ UTR and at least 80 nt of the first intron, alternatively same DNA template sequence will be delivered by AAV or other viral (or non-viral) delivery vector.

[0527] Example 11—Re-Assessment of Lead CRISPR-Cas9/DNA Donor Combinations

[0528] After testing the different strategies for gene editing, the lead CRISPR-Cas9/DNA donor combinations will be re-assessed in cells for efficiency of deletion, recombination, and off-target specificity. Cas9 mRNA or RNP will be formulated into lipid nanoparticles for delivery, sgRNAs will be formulated into nanoparticles or delivered as a recombinant AAV particle or other viral delivery vector, and donor DNA will be formulated into nanoparticles or delivered as recombinant AAV particle.

[0529] Example 12—In Vivo Testing in Relevant Animal Model

[0530] After the CRISPR-Cas9/DNA donor combinations have been re-assessed, the lead formulations will be tested in vivo in an animal model.

[0531] Culture in human cells allows direct testing on the human target and the background human genome, as described above.

[0532] Preclinical efficacy and safety evaluations can be observed through engraftment of modified mouse or human skeletal muscle cells, smooth muscle cells, cardiac muscle cells, or Pax7+ myocyte progenitor cells in a mouse model. The modified cells can be observed in the months after engraftment.

### XI. EQUIVALENTS AND SCOPE

[0533] Those skilled in the art will recognize, or be able to ascertain using no more than routine experimentation, many equivalents to the specific examples in accordance with the invention described herein. The scope of the present disclosure is not intended to be limited to the above Description, but rather is as set forth in the appended claims.

[0534] Claims or descriptions that include “or” between one or more members of a group are considered satisfied if one, more than one, or all of the group members are present in, employed in, or otherwise relevant to a given product or process unless indicated to the contrary or otherwise evident from the context. The present disclosure includes examples in which exactly one member of the group is present in, employed in, or otherwise relevant to a given product or process. The present disclosure includes examples in which more than one, or the entire group members are present in, employed in, or otherwise relevant to a given product or process.

[0535] In addition, it is to be understood that any particular example of the present disclosure that falls within the prior art may be explicitly excluded from any one or more of the claims. Since such examples are deemed to be known to one of ordinary skill in the art, they may be excluded even if the exclusion is not set forth explicitly herein. Any particular example of the compositions of the present disclosure (e.g., any antibiotic, therapeutic or active ingredient; any method of production; any method of use; etc.) can be excluded from any one or more claims, for any reason, whether or not related to the existence of prior art.

[0536] It is to be understood that the words which have been used are words of description rather than limitation, and that changes may be made within the purview of the appended claims without departing from the true scope and spirit of the present disclosure in its broader aspects.

[0537] While the present invention has been described at some length and with some particularity with respect to the several described examples, it is not intended that it should be limited to any such particulars or examples or any particular example, but it is to be construed with references to the appended claims so as to provide the broadest possible interpretation of such claims in view of the prior art and, therefore, to effectively encompass the intended scope of the invention.

### Note Regarding Illustrative Examples

[0538] While the present disclosure provides descriptions of various specific aspects for the purpose of illustrating various aspects of the present disclosure and/or its potential applications, it is understood that variations and modifications will occur to those skilled in the art. Accordingly, the invention or inventions described herein should be understood to be at least as broad as they are claimed, and not as more narrowly defined by particular illustrative aspects provided herein.

[0539] Any patent, publication, or other disclosure material identified herein is incorporated by reference into this specification in its entirety unless otherwise indicated, but only to the extent that the incorporated material does not conflict with existing descriptions, definitions, statements, or other disclosure material expressly set forth in this specification. As such, and to the extent necessary, the express disclosure as set forth in this specification supersedes any conflicting material incorporated by reference. Any material, or portion thereof, that is said to be incorporated by reference into this specification, but which conflicts with existing definitions, statements, or other disclosure material set forth herein, is only incorporated to the extent that no conflict arises between that incorporated material and the existing disclosure material. Applicants reserve the right to amend this specification to expressly recite any subject matter, or portion thereof, incorporated by reference herein.

The application's sequence listing, which the Patent Office published only in electronic form, follows.

SEQUENCE LISTING (415478 sequences)

SEQ ID NO: 1 - protein, 1368 aa, Streptococcus pyogenes [sequence omitted]

SEQ ID NO: 2 - DNA, 4107 bp, Streptococcus pyogenes
atggataagaaatactcaataggcttagatatcggcacaaatagcgtcggatgggcggtgatcactgatgaatataaggttccgtctaaaaagttcaaggttctgggaaatacagaccgccacagtatcaaaaaaaatcttataggggctcttttatttgacagtggagagacagcggaagcgactcgtctcaaacggacagctcgtagaaggtatacacgtcggaagaatcgtatttgttatctacaggagattttttcaaatgagatggcgaaagtagatgatagtttctttcatcgacttgaagagtcttttttggtggaagaagacaagaagcatgaacgtcatcctatttttggaaatatagtagatgaagttgcttatcatgagaaatatccaactatctatcatctgcgaaaaaaattggtagattctactgataaagcggatttgcgcttaatctatttggccttagcgcatatgattaagtttcgtggtcattttttgattgagggagatttaaatcctgataatagtgatgtggacaaactatttatccagttggtacaaacctacaatcaattatttgaagaaaaccctattaacgcaagtggagtagatgctaaagcgattctttctgcacgattgagtaaatcaagacgattagaaaatctcattgctcagctccccggtgagaagaaaaatggcttatttgggaatctcattgctttgtcattgggtttgacccctaattttaaatcaaattttgatttggcagaagatgctaaattacagctttcaaaagatacttacgatgatgatttagataatttattggcgcaaattggagatcaatatgctgatttgtttttggcagctaagaatttatcagatgctattttactttcagatatcctaagagtaaatactgaaataactaaggctcccctatcagcttcaatgattaaacgctacgatgaacatcatcaagacttgactcttttaaaagctttagttcgacaacaacttccagaaaagtataaagaaatcttttttgatcaatcaaaaaacggatatgcaggttatattgatgggggagctagccaagaagaattttataaatttatcaaaccaattttagaaaaaatggatggtactgaggaattattggtgaaactaaatcgtgaagatttgctgcgcaagcaacggacctttgacaacggctctattccccatcaaattcacttgggtgagctgcatgctattttgagaagacaagaagacttttatccatttttaaaagacaatcgtgagaagattgaaaaaatcttgacttttcgaattccttattatgttggtccattggcgcgtggcaatagtcgttttgcatggatgactcggaagtctgaagaaacaattaccccatggaattttgaagaagttgtcgataaaggtgcttcagctcaatcatttattgaacgcatgacaaactttgataaaaatcttccaaatgaaaaagtactaccaaaacatagtttgctttatgagtattttacggtttataacgaattgacaaaggtcaaatatgttactgaaggaatgcgaaaaccagcatttctttcaggtgaacagaagaaagccattgttgatttactcttcaaaacaaatcgaaaagtaaccgttaagcaattaaaagaagattatttcaaaaaaatagaatgttttgatagtgttgaaatttcaggagttgaagatagatttaatgcttcattaggtacctaccatgatttgctaaaaattattaaagataaagattttttggataatgaagaaaatgaagatatcttagaggatattgttttaacattgaccttatttgaagatagggagatgattgaggaaagacttaaaacatatgctcacctctttgatgataaggtgatgaaacagcttaaacgtcgccgttatactggttggggacgtttgtctcgaaaattgattaatggtattagggataagcaatctggcaaaacaatattagattttttgaaatcagatggttttgccaatcgcaattttatgcagctgatccatgatgatagtttgacatttaaagaagacattcaaaaagcacaagtgtctggacaaggcgatagtttacatgaacatattgcaaatttagctggtagccctgctattaaaaaaggtattttacagactgtaaaagttgttgatgaattggtcaaagtaatggggcggcataagccagaaaatatcgttattgaaatggcacgtgaaaatcagacaactcaaaagggccagaaaaattcgcgagagcgtatgaaacgaatcgaagaaggtatcaaagaattaggaagtcagattcttaaagagcatcctgttgaaaatactcaattgcaaaatgaaaagctctatctctattatctccaaaatggaagagacatgtatgtggaccaagaattagatattaatcgtttaagtgattatgatgtcgatcacattgttccacaaagtttccttaaagacgattcaatagacaataaggtcttaacgcgttctgataaaaatcgtggtaaatcggataacgttccaagtgaagaagtagtcaaaaagatgaaaaactattggagacaacttctaaacgccaagttaatcactcaacgtaagtttgataatttaacgaaagctgaacgtggaggtttgagtgaacttgataaagctggttttatcaaacgccaattggttgaaactcgccaaatcactaagcatgtggcacaaattttggatagtcgcatgaatactaaatacgatgaaaatgataaacttattcgagaggttaaagtgattaccttaaaatctaaattagtttctgacttccgaaaagatttccaattctataaagtacgtgagattaacaattaccatcatgcccatgatgcgtatctaaatgccgtcgttggaactgctttgattaagaaatatccaaaacttgaatcggagtttgtctatggtgattataaagtttatgatgttcgtaaaatgattgctaagtctgagcaagaaataggcaaagcaaccgcaaaatatttcttttactctaatatcatgaacttcttcaaaacagaaattacacttgcaaatggagagattcgcaaacgccctctaatcgaaactaatggggaaactggagaaattgtctgggataaagggcgagattttgccacagtgcgcaaagtattgtccatgccccaagtcaatattgtcaagaaaacagaagtacagacaggcggattctccaaggagtcaattttaccaaaaagaaattcggacaagcttattgctcgtaaaaaagactgggatccaaaaaaatatggtggttttgatagtccaacggtagcttattcagtcctagtggttgctaaggtggaaaaagggaaatcgaagaagttaaaatccgttaaagagttactagggatcacaattatggaaagaagttcctttgaaaaaaatccgattgactttttagaagctaaaggatataaggaagttaaaaaagacttaatcattaaactacctaaatatagtctttttgagttagaaaacggtcgtaaacggatgctggctagtgccggagaattacaaaaaggaaatgagctggctctgccaagcaaatatgtgaattttttatatttagctagtcattatgaaaagttgaagggtagtccagaagataacgaacaaaaacaattgtttgtggagcagcataagcattatttagatgagattattgagcaaatcagtgaattttctaagcgtgttattttagcagatgccaatttagataaagttcttagtgcatataacaaacatagagacaaaccaatacgtgaacaagcagaaaatattattcatttatttacgttgacgaatcttggagctcccgctgcttttaaatattttgatacaacaattgatcgtaaacgatatacgtctacaaaagaagttttagatgccactcttatccatcaatccatcactggtctttatgaaacacgcattgatttgagtcagctaggaggtgactga

SEQ ID NO: 3 - DNA, 4107 bp, Streptococcus pyogenes
atggacaagaagtactccattgggctcgctatcggcacaaacagcgtcggctgggccgtcattacggacgagtacaaggtgccgagcaaaaaattcaaagttctgggcaataccgatcgccacagcataaagaagaacctcattggcgccctcctgttcgactccggggagacggccgaagccacgcggctcaaaagaacagcacggcgcagatatacccgcagaaagaatcggatctgctacctgcaggagatctttagtaatgagatggctaaggtggatgactctttcttccataggctggaggagtcctttttggtggaggaggataaaaagcacgagcgccacccaatctttggcaatatcgtggacgaggtggcgtaccatgaaaagtacccaaccatatatcatctgaggaagaagcttgtagacagtactgataaggctgacttgcggttgatctatctcgcgctggcgcatatgatcaaatttcggggacacttcctcatcgagggggacctgaacccagacaacagcgatgtcgacaaactctttatccaactggttcagacttacaatcagcttttcgaagagaacccgatcaacgcatccggagttgacgccaaagcaatcctgagcgctaggctgtccaaatcccggcggctcgaaaacctcatcgcacagctccctggggagaagaagaacggcctgtttggtaatcttatcgccctgtcactcgggctgacccccaactttaaatctaacttcgacctggccgaagatgccaagcttcaactgagcaaagacacctacgatgatgatctcgacaatctgctggcccagatcggcgaccagtacgcagacctttttttggcggcaaagaacctgtcagacgccattctgctgagtgatattctgcgagtgaacacggagatcaccaaagctccgctgagcgctagtatgatcaagcgctatgatgagcaccaccaagacttgactttgctgaaggcccttgtcagacagcaactgcctgagaagtacaaggaaattttcttcgatcagtctaaaaatggctacgccggatacattgacggcggagcaagccaggaggaattttacaaatttattaagcccatcttggaaaaaatggacggcaccgaggagctgctggtaaagcttaacagagaagatctgttgcgcaaacagcgcactttcgacaatggaagcatcccccaccagattcacctgggcgaactgcacgctatcctcaggcggcaagaggatttctacccctttttgaaagataacagggaaaagattgagaaaatcctcacatttcggataccctactatgtaggccccctcgcccggggaaattccagattcgcgtggatgactcgcaaatcagaagagaccatcactccctggaacttcgaggaagtcgtggataagggggcctctgcccagtccttcatcgaaaggatgactaactttgataaaaatctgcctaacgaaaaggtgcttcctaaacactctctgctgtacgagtacttcacagtttataacgagctcaccaaggtcaaatacgtcacagaagggatgagaaagccagcattcctgtctggagagcagaagaaagctatcgtggacctcctcttcaagacgaaccggaaagttaccgtgaaacagctcaaagaagactatttcaaaaagattgaatgtttcgactctgttgaaatcagcggagtggaggatcgcttcaacgcatccctgggaacgtatcacgatctcctgaaaatcattaaagacaaggacttcctggacaatgaggagaacgaggacattcttgaggacattgtcctcacccttacgttgtttgaagatagggagatgattgaagaacgcttgaaaacttacgctcatctcttcgacgacaaagtcatgaaacagctcaagaggcgccgatatacaggatgggggcggctgtcaagaaaactgatcaatgggatccgagacaagcagagtggaaagacaatcctggattttcttaagtccgatggatttgccaaccggaacttcatgcagttgatccatgatgactctctcacctttaaggaggacatccagaaagcacaagtttctggccagggggacagtcttcacgagcacatcgctaatcttgcaggtagcccagctatcaaaaagggaatactgcagaccgttaaggtcgtggatgaactcgtcaaagtaatgggaaggcataagcccgagaatatcgttatcgagatggcccgagagaaccaaactacccagaagggacagaagaacagtagggaaaggatgaagaggattgaagagggtataaaagaactggggtcccaaatccttaaggaacacccagttgaaaacacccagcttcagaatgagaagctctacctgtactacctgcagaacggcagggacatgtacgtggatcaggaactggacatcaatcggctctccgactacgacgtggctgctatcgtgccccagtcttttctcaaagatgattctattgataataaagtgttgacaagatccgataaagctagagggaagagtgataacgtcccctcagaagaagttgtcaagaaaatgaaaaattattggcggcagctgctgaacgccaaactgatcacacaacggaagttcgataatctgactaaggctgaacgaggtggcctgtctgagttggataaagccggcttcatcaaaaggcagcttgttgagacacgccagatcaccaagcacgtggcccaaattctcgattcacgcatgaacaccaagtacgatgaaaatgacaaactgattcgagaggtgaaagttattactctgaagtctaagctggtctcagatttcagaaaggactttcagttttataaggtgagagagatcaacaattaccaccatgcgcatgatgcctacctgaatgcagtggtaggcactgcacttatcaaaaaatatcccaagcttgaatctgaatttgtttacggagactataaagtgtacgatgttaggaaaatgatcgcaaagtctgagcaggaaataggcaaggccaccgctaagtacttcttttacagcaatattatgaattttttcaagaccgagattacactggccaatggagagattcggaagcgaccacttatcgaaacaaacggagaaacaggagaaatcgtgtgggacaagggtagggatttcgcgacagtccggaaggtcctgtccatgccgcaggtgaacatcgttaaaaagaccgaagtacagaccggaggcttctccaaggaaagtatcctcccgaaaaggaacagcgacaagctgatcgcacgcaaaaaagattgggaccccaagaaatacggcggattcgattctcctacagtcgcttacagtgtactggttgtggccaaagtggagaaagggaagtctaaaaaactcaaaagcgtcaaggaactgctgggcatcacaatcatggagcgatcaagcttcgaaaaaaaccccatcgactttctcgaggcgaaaggatataaagaggtcaaaaaagacctcatcattaagcttcccaagtactctctctttgagcttgaaaacggccggaaacgaatgctcgctagtgcgggcgagctgcagaaaggtaacgagctggcactgccctctaaatacgttaatttcttgtatctggccagccactatgaaaagctcaaagggtctcccgaagataatgagcagaagcagctgttcgtggaacaacacaaacactaccttgatgagatcatcgagcaaataagcgaattctccaaaagagtgatcctcgccgacgctaacctcgataaggtgctttctgcttacaataagcacagggataagcccatcagggagcaggcagaaaacattatccacttgtttactctgaccaacttgggcgcgcctgcagccttcaagtacttcgacaccaccatagacagaaagcggtacacctctacaaaggaggtcctggacgccacactgattcatcagtcaattacggggctctatgaaacaagaatcgacctctctcagctcggtggagactaa

SEQ ID NO: 4 - DNA, 4140 bp, Streptococcus pyogenes
atggacaagaagtactccattgggctcgatatcggcacaaacagcgtcggctgggccgtcattacggacgagtacaaggtgccgagcaaaaaattcaaagttctgggcaataccgatcgccacagcataaagaagaacctcattggcgccctcctgttcgactccggggagacggccgaagccacgcggctcaaaagaacagcacggcgcagatatacccgcagaaagaatcggatctgctacctgcaggagatctttagtaatgagatggctaaggtggatgactctttcttccataggctggaggagtcctttttggtggaggaggataaaaagcacgagcgccacccaatctttggcaatatcgtggacgaggtggcgtaccatgaaaagtacccaaccatatatcatctgaggaagaagcttgtagacagtactgataaggctgacttgcggttgatctatctcgcgctggcgcatatgatcaaatttcggggacacttcctcatcgagggggacctgaacccagacaacagcgatgtcgacaaactctttatccaactggttcagacttacaatcagcttttcgaagagaacccgatcaacgcatccggagttgacgccaaagcaatcctgagcgctaggctgtccaaatcccggcggctcgaaaacctcatcgcacagctccctggggagaagaagaacggcctgtttggtaatcttatcgccctgtcactcgggctgacccccaactttaaatctaacttcgacctggccgaagatgccaagcttcaactgagcaaagacacctacgatgatgatctcgacaatctgctggcccagatcggcgaccagtacgcagacctttttttggcggcaaagaacctgtcagacgccattctgctgagtgatattctgcgagtgaacacggagatcaccaaagctccgctgagcgctagtatgatcaagcgctatgatgagcaccaccaagacttgactttgctgaaggcccttgtcagacagcaactgcctgagaagtacaaggaaattttcttcgatcagtctaaaaatggctacgccggatacattgacggcggagcaagccaggaggaattttacaaatttattaagcccatcttggaaaaaatggacggcaccgaggagctgctggtaaagcttaacagagaagatctgttgcgcaaacagcgcactttcgacaatggaagcatcccccaccagattcacctgggcgaactgcacgctatcctcaggcggcaagaggatttctacccctttttgaaagataacagggaaaagattgagaaaatcctcacatttcggataccctactatgtaggccccctcgcccggggaaattccagattcgcgtggatgactcgcaaatcagaagagaccatcactccctggaacttcgaggaagtcgtggataagggggcctctgcccagtccttcatcgaaaggatgactaactttgataaaaatctgcctaacgaaaaggtgcttcctaaacactctctgctgtacgagtacttcacagtttataacgagctcaccaaggtcaaatacgtcacagaagggatgagaaagccagcattcctgtctggagagcagaagaaagctatcgtggacctcctcttcaagacgaaccggaaagttaccgtgaaacagctcaaagaagactatttcaaaaagattgaatgtttcgactctgttgaaatcagcggagtggaggatcgcttcaacgcatccctgggaacgtatcacgatctcctgaaaatcattaaagacaaggacttcctggacaatgaggagaacgaggacattcttgaggacattgtcctcacccttacgttgtttgaagatagggagatgattgaagaacgcttgaaaacttacgctcatctcttcgacgacaaagtcatgaaacagctcaagaggcgccgatatacaggatgggggcggctgtcaagaaaactgatcaatgggatccgagacaagcagagtggaaagacaatcctggattttcttaagtccgatggatttgccaaccggaacttcatgcagttgatccatgatgactctctcacctttaaggaggacatccagaaagcacaagtttctggccagggggacagtcttcacgagcacatcgctaatcttgcaggtagcccagctatcaaaaagggaatactgcagaccgttaaggtcgtggatgaactcgtcaaagtaatgggaaggcataagcccgagaatatcgttatcgagatggcccgagagaaccaaactacccagaagggacagaagaacagtagggaaaggatgaagaggattgaagagggtataaaagaactggggtcccaaatccttaaggaacacccagttgaaaacacccagcttcagaatgagaagctctacctgtactacctgcagaacggcagggacatgtacgtggatcaggaactggacatcaatcggctctccgactacgacgtggatcatatcgtgccccagtcttttctcaaagatgattctattgataataaagtgttgacaagatccgataaaaatagagggaagagtgataacgtcccctcagaagaagttgtcaagaaaatgaaaaattattggcggcagctgctgaacgccaaactgatcacacaacggaagttcgataatctgactaaggctgaacgaggtggcctgtctgagttggataaagccggcttcatcaaaaggcagcttgttgagacacgccagatcaccaagcacgtggcccaaattctcgattcacgcatgaacaccaagtacgatgaaaatgacaaactgattcgagaggtgaaagttattactctgaagtctaagctggtctcagatttcagaaaggactttcagttttataaggtgagagagatcaacaattaccaccatgcgcatgatgcctacctgaatgcagtggtaggcactgcacttatcaaaaaatatcccaagcttgaatctgaatttgtttacggagactataaagtgtacgatgttaggaaaatgatcgcaaagtctgagcaggaaataggcaaggccaccgctaagtacttcttttacagcaatattatgaattttttcaagaccgagattacactggccaatggagagattcggaagcgaccacttatcgaaacaaacggagaaacaggagaaatcgtgtgggacaagggtagggatttcgcgacagtccggaaggtcctgtccatgccgcaggtgaacatcgttaaaaagaccgaagtacagaccggaggcttctccaaggaaagtatcctcccgaaaaggaacagcgacaagctgatcgcacgcaaaaaagattgggaccccaagaaatacggcggattcgattctcctacagtcgcttacagtgtactggttgtggccaaagtggagaaagggaagtctaaaaaactcaaaagcgtcaaggaactgctgggcatcacaatcatggagcgatcaagcttcgaaaaaaaccccatcgactttctcgaggcgaaaggatataaagaggtcaaaaaagacctcatcattaagcttcccaagtactctctctttgagcttgaaaacggccggaaacgaatgctcgctagtgcgggcgagctgcagaaaggtaacgagctggcactgccctctaaatacgttaatttcttgtatctggccagccactatgaaaagctcaaagggtctcccgaagataatgagcagaagcagctgttcgtggaacaacacaaacactaccttgatgagatcatcgagcaaataagcgaattctccaaaagagtgatcctcgccgacgctaacctcgataaggtgctttctgcttacaataagcacagggataagcccatcagggagcaggcagaaaacattatccacttgtttactctgaccaacttgggcgcgcctgcagccttcaagtacttcgacaccaccatagacagaaagcggtacacctctacaaaggaggtcctggacgccacactgattcatcagtcaattacggggctctatgaaacaagaatcgacctctctcagctcggtggagacagcagggctgaccccaagaagaagaggaaggtgtga

SEQ ID NO: 5 - DNA, 4200 bp, Streptococcus pyogenes
atggacaagaagtactccattgggctcgatatcggcacaaacagcgtcggctgggccgtcattacggacgagtacaaggtgccgagcaaaaaattcaaagttctgggcaataccgatcgccacagcataaagaagaacctcattggcgccctcctgttcgactccggggagacggccgaagccacgcggctcaaaagaacagcacggcgcagatatacccgcagaaagaatcggatctgctacctgcaggagatctttagtaatgagatggctaaggtggatgactctttcttccataggctggaggagtcctttttggtggaggaggataaaaagcacgagcgccacccaatctttggcaatatcgtggacgaggtggcgtaccatgaaaagtacccaaccatatatcatctgaggaagaagcttgtagacagtactgataaggctgacttgcggttgatctatctcgcgctggcgcatatgatcaaatttcggggacacttcctcatcgagggggacctgaacccagacaacagcgatgtcgacaaactctttatccaactggttcagacttacaatcagcttttcgaagagaacccgatcaacgcatccggagttgacgccaaagcaatcctgagcgctaggctgtccaaatcccggcggctcgaaaacctcatcgcacagctccctggggagaagaagaacggcctgtttggtaatcttatcgccctgtcactcgggctgacccccaactttaaatctaacttcgacctggccgaagatgccaagcttcaactgagcaaagacacctacgatgatgatctcgacaatctgctggcccagatcggcgaccagtacgcagacctttttttggcggcaaagaacctgtcagacgccattctgctgagtgatattctgcgagtgaacacggagatcaccaaagctccgctgagcgctagtatgatcaagcgctatgatgagcaccaccaagacttgactttgctgaaggcccttgtcagacagcaactgcctgagaagtacaaggaaattttcttcgatcagtctaaaaatggctacgccggatacattgacggcggagcaagccaggaggaattttacaaatttattaagcccatcttggaaaaaatggacggcaccgaggagctgctggtaaagcttaacagagaagatctgttgcgcaaacagcgcactttcgacaatggaagcatcccccaccagattcacctgggcgaactgcacgctatcctcaggcggcaagaggatttctacccctttttgaaagataacagggaaaagattgagaaaatcctcacatttcggataccctactatgtaggccccctcgcccggggaaattccagattcgcgtggatgactcgcaaatcagaagagaccatcactccctggaacttcgaggaagtcgtggataagggggcctctgcccagtccttcatcgaaaggatgactaactttgataaaaatctgcctaacgaaaaggtgcttcctaaacactctctgctgtacgagtacttcacagtttataacgagctcaccaaggtcaaatacgtcacagaagggatgagaaagccagcattcctgtctggagagcagaagaaagctatcgtggacctcctcttcaagacgaaccggaaagttaccgtgaaacagctcaaagaagactatttcaaaaagattgaatgtttcgactctgttgaaatcagcggagtggaggatcgcttcaacgcatccctgggaacgtatcacgatctcctgaaaatcattaaagacaaggacttcctggacaatgaggagaacgaggacattcttgaggacattgtcctcacccttacgttgtttgaagatagggagatgattgaagaacgcttgaaaacttacgctcatctcttcgacgacaaagtcatgaaacagctcaagaggcgccgatatacaggatgggggcggctgtcaagaaaactgatcaatgggatccgagacaagcagagtggaaagacaatcctggattttcttaagtccgatggatttgccaaccggaacttcatgcagttgatccatgatgactctctcacctttaaggaggacatccagaaagcacaagtttctggccagggggacagtcttcacgagcacatcgctaatcttgcaggtagcccagctatcaaaaagggaatactgcagaccgttaaggtcgtggatgaactcgtcaaagtaatgggaaggcataagcccgagaatatcgttatcgagatggcccgagagaaccaaactacccagaagggacagaagaacagtagggaaaggatgaagaggattgaagagggtataaaagaactggggtcccaaatccttaaggaacacccagttgaaaacacccagcttcagaatgagaagctctacctgtactacctgcagaacggcagggacatgtacgtggatcaggaactggacatcaatcggctctccgactacgacgtggatcatatcgtgccccagtcttttctcaaagatgattctattgataataaagtgttgacaagatccgataaaaatagagggaagagtgataacgtcccctcagaagaagttgtcaagaaaatgaaaaattattggcggcagctgctgaacgccaaactgatcacacaacggaagttcgataatctgactaaggctgaacgaggtggcctgtctgagttggataaagccggcttcatcaaaaggcagcttgttgagacacgccagatcaccaagcacgtggcccaaattctcgattcacgcatgaacaccaagtacgatgaaaatgacaaactgattcgagaggtgaaagttattactctgaagtctaagctggtctcagatttcagaaaggactttcagttttataaggtgagagagatcaacaattaccaccatgcgcatgatgcctacctgaatgcagtggtaggcactgcacttatcaaaaaatatcccaagcttgaatctgaatttgtttacggagactataaagtgtacgatgttaggaaaatgatcgcaaagtctgagcaggaaataggcaaggccaccgctaagtacttcttttacagcaatattatgaattttttcaagaccgagattacactggccaatggagagattcggaagcgaccacttatcgaaacaaacggagaaacaggagaaatcgtgtgggacaagggtagggatttcgcgacagtccggaaggtcctgtccatgccgcaggtgaacatcgttaaaaagaccgaagtacagaccggaggcttctccaaggaaagtatcctcccgaaaaggaacagcgacaagctgatcgcacgcaaaaaagattgggaccccaagaaatacggcggattcgattctcctacagtcgcttacagtgtactggttgtggccaaagtggagaaagggaagtctaaaaaactcaaaagcgtcaaggaactgctgggcatcacaatcatggagcgatcaagcttcgaaaaaaaccccatcgactttctcgaggcgaaaggatataaagaggtcaaaaaagacctcatcattaagcttcccaagtactctctctttgagcttgaaaacggccggaaacgaatgctcgctagtgcgggcgagctgcagaaaggtaacgagctggcactgccctctaaatacgttaatttcttgtatctggccagccactatgaaaagctcaaagggtctcccgaagataatgagcagaagcagctgttcgtggaacaacacaaacactaccttgatgagatcatcgagcaaataagcgaattctccaaaagagtgatcctcgccgacgctaacctcgataaggtgctttctgcttacaataagcacagggataagcccatcagggagcaggcagaaaacattatccacttgtttactctgaccaacttgggcgcgcctgcagccttcaagtacttcgacaccaccatagacagaaagcggtacacctctacaaaggaggtcctggacgccacactgattcatcagtcaattacggggctctatgaaacaagaatcgacctctctcagctcggtggagacgcggccgcagatccaaaaaagaagagaaaggtagatccaaaaaagaagagaaaggtagatccaaaaaagaagagaaaggtagatacggccgcatag

SEQ ID NO: 6 - DNA, 4326 bp, Streptococcus pyogenes
atggacaagaagtactccattgggctcgctatcggcacaaacagcgtcggctgggccgtcattacggacgagtacaaggtgccgagcaaaaaattcaaagttctgggcaataccgatcgccacagcataaagaagaacctcattggcgccctcctgttcgactccggggagacggccgaagccacgcggctcaaaagaacagcacggcgcagatatacccgcagaaagaatcggatctgctacctgcaggagatctttagtaatgagatggctaaggtggatgactctttcttccataggctggaggagtcctttttggtggaggaggataaaaagcacgagcgccacccaatctttggcaatatcgtggacgaggtggcgtaccatgaaaagtacccaaccatatatcatctgaggaagaagcttgtagacagtactgataaggctgacttgcggttgatctatctcgcgctggcgcatatgatcaaatttcggggacacttcctcatcgagggggacctgaacccagacaacagcgatgtcgacaaactctttatccaactggttcagacttacaatcagcttttcgaagagaacccgatcaacgcatccggagttgacgccaaagcaatcctgagcgctaggctgtccaaatcccggcggctcgaaaacctcatcgcacagctccctggggagaagaagaacggcctgtttggtaatcttatcgccctgtcactcgggctgacccccaactttaaatctaacttcgacctggccgaagatgccaagcttcaactgagcaaagacacctacgatgatgatctcgacaatctgctggcccagatcggcgaccagtacgcagacctttttttggcggcaaagaacctgtcagacgccattctgctgagtgatattctgcgagtgaacacggagatcaccaaagctccgctgagcgctagtatgatcaagcgctatgatgagcaccaccaagacttgactttgctgaaggcccttgtcagacagcaactgcctgagaagtacaaggaaattttcttcgatcagtctaaaaatggctacgccggatacattgacggcggagcaagccaggaggaattttacaaatttattaagcccatcttggaaaaaatggacggcaccgaggagctgctggtaaagcttaacagagaagatctgttgcgcaaacagcgcactttcgacaatggaagcatcccccaccagattcacctgggcgaactgcacgctatcctcaggcggcaagaggatttctacccctttttgaaagataacagggaaaagattgagaaaatcctcacatttcggataccctactatgtaggccccctcgcccggggaaattccagattcgcgtggatgactcgcaaatcagaagagaccatcactccctggaacttcgaggaagtcgtggataagggggcctctgcccagtccttcatcgaaaggatgactaactttgataaaaatctgcctaacgaaaaggtgcttcctaaacactctctgctgtacgagtacttcacagtttataacgagctcaccaaggtcaaatacgtcacagaagggatgagaaagccagcattcctgtctggagagcagaagaaagctatcgtggacctcctcttcaagacgaaccggaaagttaccgtgaaacagctcaaagaagactatttcaaaaagattgaatgtttcgactctgttgaaatcagcggagtggaggatcgcttcaacgcatccctgggaacgtatcacgatctcctgaaaatcattaaagacaaggacttcctggacaatgaggagaacgaggacattcttgaggacattgtcctcacccttacgttgtttgaagatagggagatgattgaagaacgcttgaaaacttacgctcatctcttcgacgacaaagtcatgaaacagctcaagaggcgccgatatacaggatgggggcggctgtcaagaaaactgatcaatgggatccgagacaagcagagtggaaagacaatcctggattttcttaagtccgatggatttgccaaccggaacttcatgcagttgatccatgatgactctctcacctttaaggaggacatccagaaagcacaagtttctggccagggggacagtcttcacgagcacatcgctaatcttgcaggtagcccagctatcaaaaagggaatactgcagaccgttaaggtcgtggatgaactcgtcaaagtaatgggaaggcataagcccgagaatatcgttatcgagatggcccgagagaaccaaactacccagaagggacagaagaacagtagggaaaggatgaagaggattgaagagggtataaaagaactggggtcccaaatccttaaggaacacccagttgaaaacacccagcttcagaatgagaagctctacctgtactacctgcagaacggcagggacatgtacgtggatcaggaactggacatcaatcggctctccgactacgacgtggctgctatcgtgccccagtcttttctcaaagatgattctattgataataaagtgttgacaagatccgataaagctagagggaagagtgataacgtcccctcagaagaagttgtcaagaaaatgaaaaattattggcggcagctgctgaacgccaaactgatcacacaacggaagttcgataatctgactaaggctgaacgaggtggcctgtctgagttggataaagccggcttcatcaaaaggcagcttgttgagacacgccagatcaccaagcacgtggcccaaattctcgattcacgcatgaacaccaagtacgatgaaaatgacaaactgattcgagaggtgaaagttattactctgaagtctaagctggtctcagatttcagaaaggactttcagttttataaggtgagagagatcaacaattaccaccatgcgcatgatgcctacctgaatgcagtggtaggcactgcacttatcaaaaaatatcccaagcttgaatctgaatttgtttacggagactataaagtgtacgatgttaggaaaatgatcgcaaagtctgagcaggaaataggcaaggccaccgctaagtacttcttttacagcaatattatgaattttttcaagaccgagattacactggccaatggagagattcggaagcgaccacttatcgaaacaaacggagaaacaggagaaatcgtgtgggacaagggtagggatttcgcgacagtccggaaggtcctgtccatgccgcaggtgaacatcgttaaaaagaccgaagtacagaccggaggcttctccaaggaaagtatcctcccgaaaaggaacagcgacaagctgatcgcacgcaaaaaagattgggaccccaagaaatacggcggattcgattctcctacagtcgcttacagtgtactggttgtggccaaagtggagaaagggaagtctaaaaaactcaaaagcgtcaaggaactgctgggcatcacaatcatggagcgatcaagcttcgaaaaaaaccccatcgactttctcgaggcgaaaggatataaagaggtcaaaaaagacctcatcattaagcttcccaagtactctctctttgagcttgaaaacggccggaaacgaatgctcgctagtgcgggcgagctgcagaaaggtaacgagctggcactgccctctaaatacgttaatttcttgtatctggccagccactatgaaaagctcaaagggtctcccgaagataatgagcagaagcagctgttcgtggaacaacacaaacactaccttgatgagatcatcgagcaaataagcgaattctccaaaagagtgatcctcgccgacgctaacctcgataaggtgctttctgcttacaataagcacagggataagcccatcagggagcaggcagaaaacattatccacttgtttactctgaccaacttgggcgcgcctgcagccttcaagtacttcgacaccaccatagacagaaagcggtacacctctacaaaggaggtcctggacgccacactgattcatcagtcaattacggggctctatgaaacaagaatcgacctctctcagctcggtggagacagcagggctgaccccaagaagaagaggaaggtggaggccagcggttccggacgggctgacgcattggacgattttgatctggatatgctgggaagtgacgccctcgatgattttgaccttgacatgcttggttcggatgcccttgatgactttgacctcgacatgctcggcagtgacgcccttgatgatttcgacctggacatgctgattaactctagatga

SEQ ID NO: 7 - DNA, 4359 bp, Streptococcus pyogenes
atgcccaagaagaagaggaaggtgggaagggggatggacaagaagtactccattgggctcgctatcggcacaaacagcgtcggctgggccgtcattacggacgagtacaaggtgccgagcaaaaaattcaaagttctgggcaataccgatcgccacagcataaagaagaacctcattggcgccctcctgttcgactccggggagacggccgaagccacgcggctcaaaagaacagcacggcgcagatatacccgcagaaagaatcggatctgctacctgcaggagatctttagtaatgagatggctaaggtggatgactctttcttccataggctggaggagtcctttttggtggaggaggataaaaagcacgagcgccacccaatctttggcaatatcgtggacgaggtggcgtaccatgaaaagtacccaaccatatatcatctgaggaagaagcttgtagacagtactgataaggctgacttgcggttgatctatctcgcgctggcgcatatgatcaaatttcggggacacttcctcatcgagggggacctgaacccagacaacagcgatgtcgacaaactctttatccaactggttcagacttacaatcagcttttcgaagagaacccgatcaacgcatccggagttgacgccaaagcaatcctgagcgctaggctgtccaaatcccggcggctcgaaaacctcatcgcacagctccctggggagaagaagaacggcctgtttggtaatcttatcgccctgtcactcgggctgacccccaactttaaatctaacttcgacctggccgaagatgccaagcttcaactgagcaaagacacctacgatgatgatctcgacaatctgctggcccagatcggcgaccagtacgcagacctttttttggcggcaaagaacctgtcagacgccattctgctgagtgatattctgcgagtgaacacggagatcaccaaagctccgctgagcgctagtatgatcaagcgctatgatgagcaccaccaagacttgactttgctgaaggcccttgtcagacagcaactgcctgagaagtacaaggaaattttcttcgatcagtctaaaaatggctacgccggatacattgacggcggagcaagccaggaggaattttacaaatttattaagcccatcttggaaaaaatggacggcaccgaggagctgctggtaaagcttaacagagaagatctgttgcgcaaacagcgcactttcgacaatggaagcatcccccaccagattcacctgggcgaactgcacgctatcctcaggcggcaagaggatttctacccctttttgaaagataacagggaaaagattgagaaaatcctcacatttcggataccctactatgtaggccccctcgcccggggaaattccagattcgcgtggatgactcgcaaatcagaagagaccatcactccctggaacttcgaggaagtcgtggataagggggcctctgcccagtccttcatcgaaaggatgactaactttgataaaaatctgcctaacgaaaaggtgcttcctaaacactctctgctgtacgagtacttcacagtttataacgagctcaccaaggtcaaatacgtcacagaagggatgagaaagccagcattcctgtctggagagcagaagaaagctatcgtggacctcctcttcaagacgaaccggaaagttaccgtgaaacagctcaaagaagactatttcaaaaagattgaatgtttcgactctgttgaaatcagcggagtggaggatcgcttcaacgcatccctgggaacgtatcacgatctcctgaaaatcattaaagacaaggacttcctggacaatgaggagaacgaggacattcttgaggacattgtcctcacccttacgttgtttgaagatagggagatgattgaagaacgcttgaaaacttacgctcatctcttcgacgacaaagtcatgaaacagctcaagaggcgccgatatacaggatgggggcggctgtcaagaaaactgatcaatgggatccgagacaagcagagtggaaagacaatcctggattttcttaagtccgatggatttgccaaccggaacttcatgcagttgatccatgatgactctctcacctttaaggaggacatccagaaagcacaagtttctggccagggggacagtcttcacgagcacatcgctaatcttgcaggtagcccagctatcaaaaagggaatactgcagaccgttaaggtcgtggatgaactcgtcaaagtaatgggaaggcataagcccgagaatatcgttatcgagatggcccgagagaaccaaactacccagaagggacagaagaacagtagggaaaggatgaagaggattgaagagggtataaaagaactggggtcccaaatccttaaggaacacccagttgaaaacacccagcttcagaatgagaagctctacctgtactacctgcagaacggcagggacatgtacgtggatcaggaactggacatcaatcggctctccgactacgacgtggctgctatcgtgccccagtcttttctcaaagatgattctattgataataaagtgttgacaagatccgataaagctagagggaagagtgataacgtcccctcagaagaagttgtcaagaaaatgaaaaattattggcggcagctgctgaacgccaaactgatcacacaacggaagttcgataatctgactaaggctgaacgaggtggcctgtctgagttggataaagccggcttcatcaaaaggcagcttgttgagacacgccagatcaccaagcacgtggcccaaattctcgattcacgcatgaacaccaagtacgatgaaaatgacaaactgattcgagaggtgaaagttattactctgaagtctaagctggtctcagatttcagaaaggactttcagttttataaggtgagagagatcaacaattaccaccatgcgcatgatgcctacctgaatgcagtggtaggcactgcacttatcaaaaaatatcccaagcttgaatctgaatttgtttacggagactataaagtgtacgatgttaggaaaatgatcgcaaagtctgagcaggaaataggcaaggccaccgctaagtacttcttttacagcaatattatgaattttttcaagaccgagattacactggccaatggagagattcggaagcgaccacttatcgaaacaaacggagaaacaggagaaatcgtgtgggacaagggtagggatttcgcgacagtccggaaggtcctgtccatgccgcaggtgaacatcgttaaaaagaccgaagtacagaccggaggcttctccaaggaaagtatcctcccgaaaaggaacagcgacaagctgatcgcacgcaaaaaagattgggaccccaagaaatacggcggattcgattctcctacagtcgcttacagtgtactggttgtggccaaagtggagaaagggaagtctaaaaaactcaaaagcgtcaaggaactgctgggcatcacaatcatggagcgatcaagcttcgaaaaaaaccccatcgactttctcgaggcgaaaggatataaagaggtcaaaaaagacctcatcattaagcttcccaagtactctctctttgagcttgaaaacggccggaaacgaatgctcgctagtgcgggcgagctgcagaaaggtaacgagctggcactgccctctaaatacgttaatttcttgtatctggccagccactatgaaaagctcaaagggtctcccgaagataatgagcagaagcagctgttcgtggaacaacacaaacactaccttgatgagatcatcgagcaaataagcgaattctccaaaagagtgatcctcgccgacgctaacctcgataaggtgctttctgcttacaataagcacagggataagcccatcagggagcaggcagaaaacattatccacttgtttactctgaccaacttgggcgcgcctgcagccttcaagtacttcgacaccaccatagacagaaagcggtacacctctacaaaggaggtcctggacgccacactgattcatcagtcaattacggggctctatgaaacaagaatcgacctctctcagctcggtggagacagcagggctgaccccaagaagaagaggaaggtggaggccagcggttccggacgggctgacgcattggacgattttgatctggatatgctgggaagtgacgccctcgatgattttgaccttgacatgcttggttcggatgcccttgatgactttgacctcgacatgctcggcagtgacgcccttgatgatttcgacctggacatgctgattaactctagatga

SEQ ID NO: 8 - protein, 1409 aa, Streptococcus thermophiles
MLFNKCIIISINLDFSNKEKCMTKPYSIGLDIGTNSVGWAVITDNYKVPSKKMKVLGNTSKKYIKKNLLGVLLFDSGITAEGRRLKRTARRRYTRRRNRILYLQEIFSTEMATLDDAFFQRLDDSFLVPDDKRDSKYPIFGNLVEEKVYHDEFPTIYHLRKYLADSTKKADLRLVYLALAHMIKYRGHFLIEGEFNSKNNDIQKNFQDFLDTYNAIFESDLSLENSKQLEEIVKDKISKLEKKDRILKLFPGEKNSGIFSEFLKLIVGNQADFRKCFNLDEKASLHFSKESYDEDLETLLGYIGDDYSDVFLKAKKLYDAILLSGFLTVTDNETEAPLSSAMIKRYNEHKEDLALLKEYIRNISLKTYNEVFKDDTKNGYAGYIDGKTNQEDFYVYLKNLLAEFEGADYFLEKIDREDFLRKQRTFDNGSIPYQIHLQEMRAILDKQAKFYPFLAKNKERIEKILTFRIPYYVGPLARGNSDFAWSIRKRNEKITPWNFEDVIDKESSAEAFINRMTSFDLYLPEEKVLPKHSLLYETFNVYNELTKVRFIAESMRDYQFLDSKQKKDIVRLYFKDKRKVTDKDIIEYLHAIYGYDGIELKGIEKQFNSSLSTYHDLLNIINDKEFLDDSSNEAIIEEIIHTLTIFEDREMIKQRLSKFENIFDKSVLKKLSRRHYTGWGKLSAKLINGIRDEKSGNTILDYLIDDGISNRNFMQLIHDDALSFKKKIQKAQIIGDEDKGNIKEVVKSLPGSPAIKKGILQSIKIVDELVKVMGGRKPESIVVEMARENQYTNQGKSNSQQRLKRLEKSLKELGSKILKENIPAKLSKIDNNALQNDRLYLYYLQNGKDMYTGDDLDIDRLSNYDIDHIIPQAFLKDNSIDNKVLVSSASNRGKSDDFPSLEVVKKRKTFWYQLLKSKLISQRKFDNLTKAERGGLLPEDKAGFIQRQLVETRQITKHVARLLDEKFNNKKDENNRAVRTVKIITLKSTLVSQFRKDFELYKVREINDFHHAHDAYLNAVIASALLKKYPKLEPEFVYGDYPKYNSFRERKSATEKVYFYSNIMNIFKKSISLADGRVIERPLIEVNEETGESVWNKESDLATVRRVLSYPQVNVVKKVEEQNHGLDRGKPKGLFNANLSSKPKPNSNENLVGAKEYLDPKKYGGYAGISNSFAVLVKGTIEKGAKKKITNVLEFQGISILDRINYRKDKLNFLLEKGYKDIELIIELPKYSLFELSDGSRRMLASILSTNNKRGEIHKGNQIFLSQKFVKLLYHAKRISNTINENHRKYVENHKKEFEELFYYILEFNENYVGAKKNGKLLNSAFQSWQNHSIDELCSSFIGPTGSERKGLFELTSRGSAADFEFLGVKIPRYRDYTPSSLLKDATLIHQSVTGLYETRIDLAKLGEG

SEQ ID NO: 9 - DNA, 4167 bp, Streptococcus thermophiles
atgactaagccatactcaattggacttgatattggaacgaatagtgttggatgggctgtaataactgataattacaaggttccgtctaaaaaaatgaaagtcttaggaaatacgagtaaaaagtatatcaaaaagaacctgttaggtgtattactctttgactctggaatcacagcagaaggaagaagattgaagcgtactgcaagaagacgttatactagacgccgtaatcgtatcctttatttgcaggaaatttttagcacggagatggctacattagatgatgctttctttcaaagacttgacgattcgtttttagttcctgatgataaacgtgatagtaagtatccgatatttggaaacttagtagaagaaaaagtctatcatgatgaatttccaactatctatcatttaaggaaatatttagcagatagtactaaaaaagcagatttgcgtctagtttatcttgcattggctcatatgattaaatatagaggtcacttcttaattgaaggagagtttaattcaaaaaataatgatattcagaagaattttcaagactttttggacacttataatgctatttttgaatcggatttatcacttgagaatagtaaacaacttgaggaaattgttaaagataagattagtaaattagaaaagaaagatcgtattttaaaactcttccctggggagaagaattcggggattttttcagagtttctaaagttgattgtaggaaatcaagctgattttaggaaatgttttaatttagacgaaaaagcctccttacatttttccaaagaaagctatgatgaagatttagagactttgttaggttatattggagatgattacagtgatgtctttctcaaagcaaagaaactttatgatgctattcttttatcgggttttctgactgtaactgataatgagacagaagcacctctctcttctgctatgataaagcgatataatgaacacaaagaagatttagcgttactaaaggaatatataagaaatatttcactaaaaacgtataatgaagtatttaaagatgacaccaaaaatggttatgctggttatattgatggaaaaacaaatcaggaagatttctacgtatatctaaaaaacctattggctgaatttgaaggtgcggattattttcttgaaaaaattgatcgagaagattttttgagaaagcaacgtacatttgacaatggttcgataccatatcagattcatcttcaagaaatgagagcaattcttgataagcaagctaaattttatcctttcttggctaaaaataaagaaagaatcgagaagattttaaccttccgaattccttattatgtaggtccacttgcgagagggaatagtgattttgcctggtcaataagaaaacgaaatgaaaaaattacaccttggaattttgaggacgttattgacaaagaatcttcggcagaggctttcattaatcgaatgactagttttgatttgtatttgccagaagagaaggtacttccaaagcatagtctcttatacgaaacttttaatgtatataatgaattaacaaaagttagatttattgccgaaagtatgagagattatcaatttttagatagtaagcagaagaaagatattgttagactttattttaaagataaaaggaaagttactgataaggatattattgaatatttacatgcaatttatgggtatgatggaattgaattaaaaggcatagagaaacagtttaattctagtttatctacttatcacgatcttttaaatattattaatgataaagagtttttggatgatagttcaaatgaagcgattatcgaagaaattatccatactttgacaatttttgaagatagagagatgataaaacaacgtctttcaaaatttgagaatatattcgataaatccgttttgaaaaagttatctcgtagacattacactggctggggtaagttatctgctaagcttattaatggtattcgagatgaaaaatctggtaatactattcttgattacttaattgatgatggtatttctaaccgtaatttcatgcaacttattcacgatgatgctctttcttttaaaaagaagatacagaaagcacaaattattggtgacgaagataaaggtaatattaaagaggtcgttaagtctttgccaggtagtcctgcgattaaaaaaggtattttacaaagcataaaaattgtagatgaattggtcaaagtaatgggaggaagaaaacccgagtcaattgttgttgagatggctcgtgaaaatcaatataccaatcaaggtaagtctaattcccaacaacgcttgaaacgtttagaaaaatctctcaaagagttaggtagtaagatacttaaggaaaatattcctgcaaaactttctaaaatagacaataacgcacttcaaaatgatcgactttacttatactatcttcaaaatggaaaagatatgtataccggagatgatttagatattgatagattaagtaattatgatattgatcatattattcctcaagcttttttgaaagataattctattgacaataaagtacttgtttcatctgctagtaaccgtggtaaatcagatgattttccaagtttagaggttgtcaaaaaaagaaagacattttggtatcaattattgaaatcaaaattaatttctcaacgaaaatttgataatctgacaaaagctgaacggggaggattgttacctgaggacaaagctggttttattcaacgccagttggttgaaacacgtcaaataacaaaacatgtagctcgtttacttgatgagaaatttaataataaaaaagatgaaaataatagagcggtacgaacagtaaaaattattaccttgaaatctaccttagtttctcaatttcgtaaggattttgaactttataaagttcgtgaaatcaatgattttcatcatgctcatgatgcttacttgaatgccgttatagcaagtgctttacttaagaaataccctaaactagagccagaatttgtgtacggtgattatccaaaatacaatagttttagagaaagaaagtccgctacagaaaaggtatatttctattcaaatatcatgaatatctttaaaaaatctatttctttagctgatggtagagttattgaaagaccacttattgaggtaaatgaggagaccggcgaatccgtttggaataaagaatctgatttagcaactgtaaggagagtactctcttatccgcaagtaaatgttgtgaaaaaagttgaggaacagaatcacggattggatagaggaaaaccaaagggattgtttaatgcaaatctttcctcaaagccaaaaccaaatagtaatgaaaatttagtaggtgctaaagagtatcttgaccccaaaaagtatggggggtatgctggaatttctaattcttttgctgttcttgttaaagggacaattgaaaaaggtgctaagaaaaaaataacaaatgtactagaatttcaaggtatttctattttagataggattaattatagaaaagataaacttaattttttacttgaaaaaggttataaagatattgagttaattattgaactacctaaatatagtttatttgaactttcagatggttcacgtcgtatgttggctagtattttgtcaacgaataataagaggggagagattcacaaaggaaatcagatttttctttcacagaagtttgtgaaattactttatcatgctaagagaataagtaacacaattaatgagaatcatagaaaatatgttgagaaccataaaaaagagtttgaagaattattttactacattcttgagtttaatgagaattatgttggagctaaaaagaatggtaaacttttaaactctgcctttcaatcttggcaaaatcatagtatagatgaactctgtagtagttttataggacctaccggaagtgaaagaaaggggctatttgaattaacctctcgtggaagtgctgctgattttgaatttttaggtgttaaaattccaaggtatagagactataccccatcatccctattaaaagatgccacacttattcatcaatctgttacaggcctctatgaaacacgaatagaccttgccaaactaggagagggttaa

SEQ ID NO: 10 - DNA, 3366 bp, Streptococcus thermophilus
atgagcgacctggtgctgggcctggacatcggcatcggcagcgtgggcgtgggcatcctgaacaaggtgaccggcgagatcatccacaagaacagtcgcatcttccctgctgctcaggctgagaacaacctggtgcgccgcaccaaccgccagggtcgccggcttgctcgccgcaagaagcaccggcgcgtgcgcctgaaccgcctgttcgaggagagcggcctgatcaccgacttcaccaagatcagcatcaacctgaacccctaccagctgcgcgtgaagggcctgaccgacgagctgagcaacgaggagctgttcatcgccctgaagaacatggtgaagcaccgcggcatcagctacctggacgacgccagcgacgacggcaacagcagcgtgggcgactacgcccagatcgtgaaggagaacagcaagcagctggagaccaagacccccggccagatccagctggagcgctaccagacctacggccagctgcgcggcgacttcaccgtggagaaggacggcaagaagcaccgcctgatcaacgtgttccccaccagcgcctaccgcagcgaggccctgcgcatcctgcagacccagcaggagttcaacccccagatcaccgacgagttcatcaaccgctacctggagatcctgaccggcaagcgcaagtactaccacggccccggcaacgagaagagccgcaccgactacggccgctaccgcaccagcggcgagaccctggacaacatcttcggcatcctgatcggcaagtgcaccttctaccccgacgagttccgcgccgccaaggccagctacaccgcccaggagttcaacctgctgaacgacctgaacaacctgaccgtgcccaccgagaccaagaagctgagcaaggagcagaagaaccagatcatcaactacgtgaagaacgagaaggccatgggccccgccaagctgttcaagtacatcgccaagctgctgagctgcgacgtggccgacatcaagggctaccgcatcgacaagagcggcaaggccgagatccacaccttcgaggcctaccgcaagatgaagaccctggagaccctggacatcgagcagatggaccgcgagaccctggacaagctggcctacgtgctgaccctgaacaccgagcgcgagggcatccaggaggccctggagcacgagttcgccgacggcagcttcagccagaagcaggtggacgagctggtgcagttccgcaaggccaacagcagcatcttcggcaagggctggcacaacttcagcgtgaagctgatgatggagctgatccccgagctgtacgagaccagcgaggagcagatgaccatcctgacccgcctgggcaagcagaagaccaccagcagcagcaacaagaccaagtacatcgacgagaagctgctgaccgaggagatctacaaccccgtggtggccaagagcgtgcgccaggccatcaagatcgtgaacgccgccatcaaggagtacggcgacttcgacaacatcgtgatcgagatggcccgcgagaccaacgaggacgacgagaagaaggccatccagaagatccagaaggccaacaaggacgagaaggacgccgccatgctgaaggccgccaaccagtacaacggcaaggccgagctgccccacagcgtgttccacggccacaagcagctggccaccaagatccgcctgtggcaccagcagggcgagcgctgcctgtacaccggcaagaccatcagcatccacgacctgatcaacaacagcaaccagttcgaggtggaccacatcctgcccctgagcatcaccttcgacgacagcctggccaacaaggtgctggtgtacgccaccgccaaccaggagaagggccagcgcaccccctaccaggccctggacagcatggacgacgcctggagcttccgcgagctgaaggccttcgtgcgcgagagcaagaccctgagcaacaagaagaaggagtacctgctgaccgaggaggacatcagcaagttcgacgtgcgcaagaagttcatcgagcgcaacctggtggacacccgctacgccagccgcgtggtgctgaacgccctgcaggagcacttccgcgcccacaagatcgacaccaaggtgagcgtggtgcgcggccagttcaccagccagctgcgccgccactggggcatcgagaagacccgcgacacctaccaccaccacgccgtggacgccctgatcattgcggcttctagccagctgaacctgtggaagaagcagaagaacaccctggtgagctacagcgaggaccagctgctggacatcgagaccggcgagctgatcagcgacgacgagtacaaggagagcgtgttcaaggccccctaccagcacttcgtggacaccctgaagagcaaggagttcgaggacagcatcctgttcagctaccaggtggacagcaagttcaaccgcaagatcagcgacgccaccatctacgccacccgccaggccaaggtgggcaaggacaaggccgacgagacctacgtgctgggcaagatcaaggacatctacacccaggacggctacgacgccttcatgaagatctacaagaaggacaagagcaagttcctgatgtaccgccacgacccccagaccttcgagaaggtgatcgagcccatcctggagaactaccccaacaagcagatcaacgataaaggcaaggaggtgccctgcaaccccttcctgaagtacaaggaggagcacggctacatccgcaagtacagcaagaagggcaacggccccgagatcaagagcctgaagtactacgacagcaagctgggcaaccacatcgacatcacccccaaggacagcaacaacaaggtggtgctgcagagcgtgagcccctggcgcgccgacgtgtacttcaacaagaccaccggcaagtacgagatcctgggcctgaagtacgccgacctgcagtttgataagggcaccggcacctacaagatcagccaggagaagtacaacgacatcaagaagaaggagggcgtggacagcgacagcgagttcaagttcaccctgtacaagaacgaccttctgctggtgaaggacaccgagaccaaggagcaacagctgttccgcttcctgagccgcaccatgcccaagcagaagcactacgtggagctgaagccctacgacaagcagaagttcgagggcggcgaggccctgatcaaggtgctgggcaacgtggccaacagcggccagtgcaagaagggcctgggcaagagcaacatcagcatctacaaggtgcgcaccgacgtgctgggcaaccagcacatcatcaagaacgagggcgacaagcccaagctggacttctaa

SEQ ID NO: 11 - DNA, 3366 bp, Streptococcus thermophilus
atgagcgacctggtgctgggcctggccatcggcatcggcagcgtgggcgtgggcatcctgaacaaggtgaccggcgagatcatccacaagaacagtcgcatcttccctgctgctcaggctgagaacaacctggtgcgccgcaccaaccgccagggtcgccggcttgctcgccgcaagaagcaccggcgcgtgcgcctgaaccgcctgttcgaggagagcggcctgatcaccgacttcaccaagatcagcatcaacctgaacccctaccagctgcgcgtgaagggcctgaccgacgagctgagcaacgaggagctgttcatcgccctgaagaacatggtgaagcaccgcggcatcagctacctggacgacgccagcgacgacggcaacagcagcgtgggcgactacgcccagatcgtgaaggagaacagcaagcagctggagaccaagacccccggccagatccagctggagcgctaccagacctacggccagctgcgcggcgacttcaccgtggagaaggacggcaagaagcaccgcctgatcaacgtgttccccaccagcgcctaccgcagcgaggccctgcgcatcctgcagacccagcaggagttcaacccccagatcaccgacgagttcatcaaccgctacctggagatcctgaccggcaagcgcaagtactaccacggccccggcaacgagaagagccgcaccgactacggccgctaccgcaccagcggcgagaccctggacaacatcttcggcatcctgatcggcaagtgcaccttctaccccgacgagttccgcgccgccaaggccagctacaccgcccaggagttcaacctgctgaacgacctgaacaacctgaccgtgcccaccgagaccaagaagctgagcaaggagcagaagaaccagatcatcaactacgtgaagaacgagaaggccatgggccccgccaagctgttcaagtacatcgccaagctgctgagctgcgacgtggccgacatcaagggctaccgcatcgacaagagcggcaaggccgagatccacaccttcgaggcctaccgcaagatgaagaccctggagaccctggacatcgagcagatggaccgcgagaccctggacaagctggcctacgtgctgaccctgaacaccgagcgcgagggcatccaggaggccctggagcacgagttcgccgacggcagcttcagccagaagcaggtggacgagctggtgcagttccgcaaggccaacagcagcatcttcggcaagggctggcacaacttcagcgtgaagctgatgatggagctgatccccgagctgtacgagaccagcgaggagcagatgaccatcctgacccgcctgggcaagcagaagaccaccagcagcagcaacaagaccaagtacatcgacgagaagctgctgaccgaggagatctacaaccccgtggtggccaagagcgtgcgccaggccatcaagatcgtgaacgccgccatcaaggagtacggcgacttcgacaacatcgtgatcgagatggcccgcgagaccaacgaggacgacgagaagaaggccatccagaagatccagaaggccaacaaggacgagaaggacgccgccatgctgaaggccgccaaccagtacaacggcaaggccgagctgccccacagcgtgttccacggccacaagcagctggccaccaagatccgcctgtggcaccagcagggcgagcgctgcctgtacaccggcaagaccatcagcatccacgacctgatcaacaacagcaaccagttcgaggtggctgccatcctgcccctgagcatcaccttcgacgacagcctggccaacaaggtgctggtgtacgccaccgccgctcaggagaagggccagcgcaccccctaccaggccctggacagcatggacgacgcctggagcttccgcgagctgaaggccttcgtgcgcgagagcaagaccctgagcaacaagaagaaggagtacctgctgaccgaggaggacatcagcaagttcgacgtgcgcaagaagttcatcgagcgcaacctggtggacacccgctacgccagccgcgtggtgctgaacgccctgcaggagcacttccgcgcccacaagatcgacaccaaggtgagcgtggtgcgcggccagttcaccagccagctgcgccgccactggggcatcgagaagacccgcgacacctaccaccaccacgccgtggacgccctgatcattgcggcttctagccagctgaacctgtggaagaagcagaagaacaccctggtgagctacagcgaggaccagctgctggacatcgagaccggcgagctgatcagcgacgacgagtacaaggagagcgtgttcaaggccccctaccagcacttcgtggacaccctgaagagcaaggagttcgaggacagcatcctgttcagctaccaggtggacagcaagttcaaccgcaagatcagcgacgccaccatctacgccacccgccaggccaaggtgggcaaggacaaggccgacgagacctacgtgctgggcaagatcaaggacatctacacccaggacggctacgacgccttcatgaagatctacaagaaggacaagagcaagttcctgatgtaccgccacgacccccagaccttcgagaaggtgatcgagcccatcctggagaactaccccaacaagcagatcaacgataaaggcaaggaggtgccctgcaaccccttcctgaagtacaaggaggagcacggctacatccgcaagtacagcaagaagggcaacggccccgagatcaagagcctgaagtactacgacagcaagctgggcaaccacatcgacatcacccccaaggacagcaacaacaaggtggtgctgcagagcgtgagcccctggcgcgccgacgtgtacttcaacaagaccaccggcaagtacgagatcctgggcctgaagtacgccgacctgcagtttgataagggcaccggcacctacaagatcagccaggagaagtacaacgacatcaagaagaaggagggcgtggacagcgacagcgagttcaagttcaccctgtacaagaacgaccttctgctggtgaaggacaccgagaccaaggagcaacagctgttccgcttcctgagccgcaccatgcccaagcagaagcactacgtggagctgaagccctacgacaagcagaagttcgagggcggcgaggccctgatcaaggtgctgggcaacgtggccaacagcggccagtgcaagaagggcctgggcaagagcaacatcagcatctacaaggtgcgcaccgacgtgctgggcaaccagcacatcatcaagaacgagggcgacaagcccaagctggacttctaa

SEQ ID NO: 12 - DNA, 3399 bp, Streptococcus thermophilus
atgagcgacctggtgctgggcctggacatcggcatcggcagcgtgggcgtgggcatcctgaacaaggtgaccggcgagatcatccacaagaacagtcgcatcttccctgctgctcaggctgagaacaacctggtgcgccgcaccaaccgccagggtcgccggcttgctcgccgcaagaagcaccggcgcgtgcgcctgaaccgcctgttcgaggagagcggcctgatcaccgacttcaccaagatcagcatcaacctgaacccctaccagctgcgcgtgaagggcctgaccgacgagctgagcaacgaggagctgttcatcgccctgaagaacatggtgaagcaccgcggcatcagctacctggacgacgccagcgacgacggcaacagcagcgtgggcgactacgcccagatcgtgaaggagaacagcaagcagctggagaccaagacccccggccagatccagctggagcgctaccagacctacggccagctgcgcggcgacttcaccgtggagaaggacggcaagaagcaccgcctgatcaacgtgttccccaccagcgcctaccgcagcgaggccctgcgcatcctgcagacccagcaggagttcaacccccagatcaccgacgagttcatcaaccgctacctggagatcctgaccggcaagcgcaagtactaccacggccccggcaacgagaagagccgcaccgactacggccgctaccgcaccagcggcgagaccctggacaacatcttcggcatcctgatcggcaagtgcaccttctaccccgacgagttccgcgccgccaaggccagctacaccgcccaggagttcaacctgctgaacgacctgaacaacctgaccgtgcccaccgagaccaagaagctgagcaaggagcagaagaaccagatcatcaactacgtgaagaacgagaaggccatgggccccgccaagctgttcaagtacatcgccaagctgctgagctgcgacgtggccgacatcaagggctaccgcatcgacaagagcggcaaggccgagatccacaccttcgaggcctaccgcaagatgaagaccctggagaccctggacatcgagcagatggaccgcgagaccctggacaagctggcctacgtgctgaccctgaacaccgagcgcgagggcatccaggaggccctggagcacgagttcgccgacggcagcttcagccagaagcaggtggacgagctggtgcagttccgcaaggccaacagcagcatcttcggcaagggctggcacaacttcagcgtgaagctgatgatggagctgatccccgagctgtacgagaccagcgaggagcagatgaccatcctgacccgcctgggcaagcagaagaccaccagcagcagcaacaagaccaagtacatcgacgagaagctgctgaccgaggagatctacaaccccgtggtggccaagagcgtgcgccaggccatcaagatcgtgaacgccgccatcaaggagtacggcgacttcgacaacatcgtgatcgagatggcccgcgagaccaacgaggacgacgagaagaaggccatccagaagatccagaaggccaacaaggacgagaaggacgccgccatgctgaaggccgccaaccagtacaacggcaaggccgagctgccccacagcgtgttccacggccacaagcagctggccaccaagatccgcctgtggcaccagcagggcgagcgctgcctgtacaccggcaagaccatcagcatccacgacctgatcaacaacagcaaccagttcgaggtggaccacatcctgcccctgagcatcaccttcgacgacagcctggccaacaaggtgctggtgtacgccaccgccaaccaggagaagggccagcgcaccccctaccaggccctggacagcatggacgacgcctggagcttccgcgagctgaaggccttcgtgcgcgagagcaagaccctgagcaacaagaagaaggagtacctgctgaccgaggaggacatcagcaagttcgacgtgcgcaagaagttcatcgagcgcaacctggtggacacccgctacgccagccgcgtggtgctgaacgccctgcaggagcacttccgcgcccacaagatcgacaccaaggtgagcgtggtgcgcggccagttcaccagccagctgcgccgccactggggcatcgagaagacccgcgacacctaccaccaccacgccgtggacgccctgatcattgcggcttctagccagctgaacctgtggaagaagcagaagaacaccctggtgagctacagcgaggaccagctgctggacatcgagaccggcgagctgatcagcgacgacgagtacaaggagagcgtgttcaaggccccctaccagcacttcgtggacaccctgaagagcaaggagttcgaggacagcatcctgttcagctaccaggtggacagcaagttcaaccgcaagatcagcgacgccaccatctacgccacccgccaggccaaggtgggcaaggacaaggccgacgagacctacgtgctgggcaagatcaaggacatctacacccaggacggctacgacgccttcatgaagatctacaagaaggacaagagcaagttcctgatgtaccgccacgacccccagaccttcgagaaggtgatcgagcccatcctggagaactaccccaacaagcagatcaacgataaaggcaaggaggtgccctgcaaccccttcctgaagtacaaggaggagcacggctacatccgcaagtacagcaagaagggcaacggccccgagatcaagagcctgaagtactacgacagcaagctgggcaaccacatcgacatcacccccaaggacagcaacaacaaggtggtgctgcagagcgtgagcccctggcgcgccgacgtgtacttcaacaagaccaccggcaagtacgagatcctgggcctgaagtacgccgacctgcagtttgataagggcaccggcacctacaagatcagccaggagaagtacaacgacatcaagaagaaggagggcgtggacagcgacagcgagttcaagttcaccctgtacaagaacgaccttctgctggtgaaggacaccgagaccaaggagcaacagctgttccgcttcctgagccgcaccatgcccaagcagaagcactacgtggagctgaagccctacgacaagcagaagttcgagggcggcgaggccctgatcaaggtgctgggcaacgtggccaacagcggccagtgcaagaagggcctgggcaagagcaacatcagcatctacaaggtgcgcaccgacgtgctgggcaaccagcacatcatcaagaacgagggcgacaagcccaagctggacttcagcagggctgaccccaagaagaagaggaaggtgtga

SEQ ID NO: 13 - DNA, 3459 bp, Streptococcus thermophilus
atgagcgacctggtgctgggcctggacatcggcatcggcagcgtgggcgtgggcatcctgaacaaggtgaccggcgagatcatccacaagaacagtcgcatcttccctgctgctcaggctgagaacaacctggtgcgccgcaccaaccgccagggtcgccggcttgctcgccgcaagaagcaccggcgcgtgcgcctgaaccgcctgttcgaggagagcggcctgatcaccgacttcaccaagatcagcatcaacctgaacccctaccagctgcgcgtgaagggcctgaccgacgagctgagcaacgaggagctgttcatcgccctgaagaacatggtgaagcaccgcggcatcagctacctggacgacgccagcgacgacggcaacagcagcgtgggcgactacgcccagatcgtgaaggagaacagcaagcagctggagaccaagacccccggccagatccagctggagcgctaccagacctacggccagctgcgcggcgacttcaccgtggagaaggacggcaagaagcaccgcctgatcaacgtgttccccaccagcgcctaccgcagcgaggccctgcgcatcctgcagacccagcaggagttcaacccccagatcaccgacgagttcatcaaccgctacctggagatcctgaccggcaagcgcaagtactaccacggccccggcaacgagaagagccgcaccgactacggccgctaccgcaccagcggcgagaccctggacaacatcttcggcatcctgatcggcaagtgcaccttctaccccgacgagttccgcgccgccaaggccagctacaccgcccaggagttcaacctgctgaacgacctgaacaacctgaccgtgcccaccgagaccaagaagctgagcaaggagcagaagaaccagatcatcaactacgtgaagaacgagaaggccatgggccccgccaagctgttcaagtacatcgccaagctgctgagctgcgacgtggccgacatcaagggctaccgcatcgacaagagcggcaaggccgagatccacaccttcgaggcctaccgcaagatgaagaccctggagaccctggacatcgagcagatggaccgcgagaccctggacaagctggcctacgtgctgaccctgaacaccgagcgcgagggcatccaggaggccctggagcacgagttcgccgacggcagcttcagccagaagcaggtggacgagctggtgcagttccgcaaggccaacagcagcatcttcggcaagggctggcacaacttcagcgtgaagctgatgatggagctgatccccgagctgtacgagaccagcgaggagcagatgaccatcctgacccgcctgggcaagcagaagaccaccagcagcagcaacaagaccaagtacatcgacgagaagctgctgaccgaggagatctacaaccccgtggtggccaagagcgtgcgccaggccatcaagatcgtgaacgccgccatcaaggagtacggcgacttcgacaacatcgtgatcgagatggcccgcgagaccaacgaggacgacgagaagaaggccatccagaagatccagaaggccaacaaggacgagaaggacgccgccatgctgaaggccgccaaccagtacaacggcaaggccgagctgccccacagcgtgttccacggccacaagcagctggccaccaagatccgcctgtggcaccagcagggcgagcgctgcctgtacaccggcaagaccatcagcatccacgacctgatcaacaacagcaaccagttcgaggtggaccacatcctgcccctgagcatcaccttcgacgacagcctggccaacaaggtgctggtgtacgccaccgccaaccaggagaagggccagcgcaccccctaccaggccctggacagcatggacgacgcctggagcttccgcgagctgaaggccttcgtgcgcgagagcaagaccctgagcaacaagaagaaggagtacctgctgaccgaggaggacatcagcaagttcgacgtgcgcaagaagttcatcgagcgcaacctggtggacacccgctacgccagccgcgtggtgctgaacgccctgcaggagcacttccgcgcccacaagatcgacaccaaggtgagcgtggtgcgcggccagttcaccagccagctgcgccgccactggggcatcgagaagacccgcgacacctaccaccaccacgccgtggacgccctgatcattgcggcttctagccagctgaacctgtggaagaagcagaagaacaccctggtgagctacagcgaggaccagctgctggacatcgagaccggcgagctgatcagcgacgacgagtacaaggagagcgtgttcaaggccccctaccagcacttcgtggacaccctgaagagcaaggagttcgaggacagcatcctgttcagctaccaggtggacagcaagttcaaccgcaagatcagcgacgccaccatctacgccacccgccaggccaaggtgggcaaggacaaggccgacgagacctacgtgctgggcaagatcaaggacatctacacccaggacggctacgacgccttcatgaagatctacaagaaggacaagagcaagttcctgatgtaccgccacgacccccagaccttcgagaaggtgatcgagcccatcctggagaactaccccaacaagcagatcaacgataaaggcaaggaggtgccctgcaaccccttcctgaagtacaaggaggagcacggctacatccgcaagtacagcaagaagggcaacggccccgagatcaagagcctgaagtactacgacagcaagctgggcaaccacatcgacatcacccccaaggacagcaacaacaaggtggtgctgcagagcgtgagcccctggcgcgccgacgtgtacttcaacaagaccaccggcaagtacgagatcctgggcctgaagtacgccgacctgcagtttgataagggcaccggcacctacaagatcagccaggagaagtacaacgacatcaagaagaaggagggcgtggacagcgacagcgagttcaagttcaccctgtacaagaacgaccttctgctggtgaaggacaccgagaccaaggagcaacagctgttccgcttcctgagccgcaccatgcccaagcagaagcactacgtggagctgaagccctacgacaagcagaagttcgagggcggcgaggccctgatcaaggtgctgggcaacgtggccaacagcggccagtgcaagaagggcctgggcaagagcaacatcagcatctacaaggtgcgcaccgacgtgctgggcaaccagcacatcatcaagaacgagggcgacaagcccaagctggacttcgcggccgcagatccaaaaaagaagagaaaggtagatccaaaaaagaagagaaaggtagatccaaaaaagaagagaaaggtagatacggccgcatag

SEQ ID NO: 14 - DNA, 3585 bp, Streptococcus thermophilus
atgagcgacctggtgctgggcctggccatcggcatcggcagcgtgggcgtgggcatcctgaacaaggtgaccggcgagatcatccacaagaacagtcgcatcttccctgctgctcaggctgagaacaacctggtgcgccgcaccaaccgccagggtcgccggcttgctcgccgcaagaagcaccggcgcgtgcgcctgaaccgcctgttcgaggagagcggcctgatcaccgacttcaccaagatcagcatcaacctgaacccctaccagctgcgcgtgaagggcctgaccgacgagctgagcaacgaggagctgttcatcgccctgaagaacatggtgaagcaccgcggcatcagctacctggacgacgccagcgacgacggcaacagcagcgtgggcgactacgcccagatcgtgaaggagaacagcaagcagctggagaccaagacccccggccagatccagctggagcgctaccagacctacggccagctgcgcggcgacttcaccgtggagaaggacggcaagaagcaccgcctgatcaacgtgttccccaccagcgcctaccgcagcgaggccctgcgcatcctgcagacccagcaggagttcaacccccagatcaccgacgagttcatcaaccgctacctggagatcctgaccggcaagcgcaagtactaccacggccccggcaacgagaagagccgcaccgactacggccgctaccgcaccagcggcgagaccctggacaacatcttcggcatcctgatcggcaagtgcaccttctaccccgacgagttccgcgccgccaaggccagctacaccgcccaggagttcaacctgctgaacgacctgaacaacctgaccgtgcccaccgagaccaagaagctgagcaaggagcagaagaaccagatcatcaactacgtgaagaacgagaaggccatgggccccgccaagctgttcaagtacatcgccaagctgctgagctgcgacgtggccgacatcaagggctaccgcatcgacaagagcggcaaggccgagatccacaccttcgaggcctaccgcaagatgaagaccctggagaccctggacatcgagcagatggaccgcgagaccctggacaagctggcctacgtgctgaccctgaacaccgagcgcgagggcatccaggaggccctggagcacgagttcgccgacggcagcttcagccagaagcaggtggacgagctggtgcagttccgcaaggccaacagcagcatcttcggcaagggctggcacaacttcagcgtgaagctgatgatggagctgatccccgagctgtacgagaccagcgaggagcagatgaccatcctgacccgcctgggcaagcagaagaccaccagcagcagcaacaagaccaagtacatcgacgagaagctgctgaccgaggagatctacaaccccgtggtggccaagagcgtgcgccaggccatcaagatcgtgaacgccgccatcaaggagtacggcgacttcgacaacatcgtgatcgagatggcccgcgagaccaacgaggacgacgagaagaaggccatccagaagatccagaaggccaacaaggacgagaaggacgccgccatgctgaaggccgccaaccagtacaacggcaaggccgagctgccccacagcgtgttccacggccacaagcagctggccaccaagatccgcctgtggcaccagcagggcgagcgctgcctgtacaccggcaagaccatcagcatccacgacctgatcaacaacagcaaccagttcgaggtggctgccatcctgcccctgagcatcaccttcgacgacagcctggccaacaaggtgctggtgtacgccaccgccgctcaggagaagggccagcgcaccccctaccaggccctggacagcatggacgacgcctggagcttccgcgagctgaaggccttcgtgcgcgagagcaagaccctgagcaacaagaagaaggagtacctgctgaccgaggaggacatcagcaagttcgacgtgcgcaagaagttcatcgagcgcaacctggtggacacccgctacgccagccgcgtggtgctgaacgccctgcaggagcacttccgcgcccacaagatcgacaccaaggtgagcgtggtgcgcggccagttcaccagccagctgcgccgccactggggcatcgagaagacccgcgacacctaccaccaccacgccgtggacgccctgatcattgcggcttctagccagctgaacctgtggaagaagcagaagaacaccctggtgagctacagcgaggaccagctgctggacatcgagaccggcgagctgatcagcgacgacgagtacaaggagagcgtgttcaaggccccctaccagcacttcgtggacaccctgaagagcaaggagttcgaggacagcatcctgttcagctaccaggtggacagcaagttcaaccgcaagatcagcgacgccaccatctacgccacccgccaggccaaggtgggcaaggacaaggccgacgagacctacgtgctgggcaagatcaaggacatctacacccaggacggctacgacgccttcatgaagatctacaagaaggacaagagcaagttcctgatgtaccgccacgacccccagaccttcgagaaggtgatcgagcccatcctggagaactaccccaacaagcagatcaacgataaaggcaaggaggtgccctgcaaccccttcctgaagtacaaggaggagcacggctacatccgcaagtacagcaagaagggcaacggccccgagatcaagagcctgaagtactacgacagcaagctgggcaaccacatcgacatcacccccaaggacagcaacaacaaggtggtgctgcagagcgtgagcccctggcgcgccgacgtgtacttcaacaagaccaccggcaagtacgagatcctgggcctgaagtacgccgacctgcagtttgataagggcaccggcacctacaagatcagccaggagaagtacaacgacatcaagaagaaggagggcgtggacagcgacagcgagttcaagttcaccctgtacaagaacgaccttctgctggtgaaggacaccgagaccaaggagcaacagctgttccgcttcctgagccgcaccatgcccaagcagaagcactacgtggagctgaagccctacgacaagcagaagttcgagggcggcgaggccctgatcaaggtgctgggcaacgtggccaacagcggccagtgcaagaagggcctgggcaagagcaacatcagcatctacaaggtgcgcaccgacgtgctgggcaaccagcacatcatcaagaacgagggcgacaagcccaagctggacttcagcagggctgaccccaagaagaagaggaaggtggaggccagcggttccggacgggctgacgcattggacgattttgatctggatatgctgggaagtgacgccctcgatgattttgaccttgacatgcttggttcggatgcccttgatgactttgacctcgacatgctcggcagtgacgcccttgatgatttcgacctggacatgctgattaactctagatga

SEQ ID NO: 15 - DNA, 3606 bp, Streptococcus thermophilus
atgcccaagaagaagaggaaggtgagcgacctggtgctgggcctggccatcggcatcggcagcgtgggcgtgggcatcctgaacaaggtgaccggcgagatcatccacaagaacagtcgcatcttccctgctgctcaggctgagaacaacctggtgcgccgcaccaaccgccagggtcgccggcttgctcgccgcaagaagcaccggcgcgtgcgcctgaaccgcctgttcgaggagagcggcctgatcaccgacttcaccaagatcagcatcaacctgaacccctaccagctgcgcgtgaagggcctgaccgacgagctgagcaacgaggagctgttcatcgccctgaagaacatggtgaagcaccgcggcatcagctacctggacgacgccagcgacgacggcaacagcagcgtgggcgactacgcccagatcgtgaaggagaacagcaagcagctggagaccaagacccccggccagatccagctggagcgctaccagacctacggccagctgcgcggcgacttcaccgtggagaaggacggcaagaagcaccgcctgatcaacgtgttccccaccagcgcctaccgcagcgaggccctgcgcatcctgcagacccagcaggagttcaacccccagatcaccgacgagttcatcaaccgctacctggagatcctgaccggcaagcgcaagtactaccacggccccggcaacgagaagagccgcaccgactacggccgctaccgcaccagcggcgagaccctggacaacatcttcggcatcctgatcggcaagtgcaccttctaccccgacgagttccgcgccgccaaggccagctacaccgcccaggagttcaacctgctgaacgacctgaacaacctgaccgtgcccaccgagaccaagaagctgagcaaggagcagaagaaccagatcatcaactacgtgaagaacgagaaggccatgggccccgccaagctgttcaagtacatcgccaagctgctgagctgcgacgtggccgacatcaagggctaccgcatcgacaagagcggcaaggccgagatccacaccttcgaggcctaccgcaagatgaagaccctggagaccctggacatcgagcagatggaccgcgagaccctggacaagctggcctacgtgctgaccctgaacaccgagcgcgagggcatccaggaggccctggagcacgagttcgccgacggcagcttcagccagaagcaggtggacgagctggtgcagttccgcaaggccaacagcagcatcttcggcaagggctggcacaacttcagcgtgaagctgatgatggagctgatccccgagctgtacgagaccagcgaggagcagatgaccatcctgacccgcctgggcaagcagaagaccaccagcagcagcaacaagaccaagtacatcgacgagaagctgctgaccgaggagatctacaaccccgtggtggccaagagcgtgcgccaggccatcaagatcgtgaacgccgccatcaaggagtacggcgacttcgacaacatcgtgatcgagatggcccgcgagaccaacgaggacgacgagaagaaggccatccagaagatccagaaggccaacaaggacgagaaggacgccgccatgctgaaggccgccaaccagtacaacggcaaggccgagctgccccacagcgtgttccacggccacaagcagctggccaccaagatccgcctgtggcaccagcagggcgagcgctgcctgtacaccggcaagaccatcagcatccacgacctgatcaacaacagcaaccagttcgaggtggctgccatcctgcccctgagcatcaccttcgacgacagcctggccaacaaggtgctggtgtacgccaccgccgctcaggagaagggccagcgcaccccctaccaggccctggacagcatggacgacgcctggagcttccgcgagctgaaggccttcgtgcgcgagagcaagaccctgagcaacaagaagaaggagtacctgctgaccgaggaggacatcagcaagttcgacgtgcgcaagaagttcatcgagcgcaacctggtggacacccgctacgccagccgcgtggtgctgaacgccctgcaggagcacttccgcgcccacaagatcgacaccaaggtgagcgtggtgcgcggccagttcaccagccagctgcgccgccactggggcatcgagaagacccgcgacacctaccaccaccacgccgtggacgccctgatcattgcggcttctagccagctgaacctgtggaagaagcagaagaacaccctggtgagctacagcgaggaccagctgctggacatcgagaccggcgagctgatcagcgacgacgagtacaaggagagcgtgttcaaggccccctaccagcacttcgtggacaccctgaagagcaaggagttcgaggacagcatcctgttcagctaccaggtggacagcaagttcaaccgcaagatcagcgacgccaccatctacgccacccgccaggccaaggtgggcaaggacaaggccgacgagacctacgtgctgggcaagatcaaggacatctacacccaggacggctacgacgccttcatgaagatctacaagaaggacaagagcaagttcctgatgtaccgccacgacccccagaccttcgagaaggtgatcgagcccatcctggagaactaccccaacaagcagatcaacgataaaggcaaggaggtgccctgcaaccccttcctgaagtacaaggaggagcacggctacatccgcaagtacagcaagaagggcaacggccccgagatcaagagcctgaagtactacgacagcaagctgggcaaccacatcgacatcacccccaaggacagcaacaacaaggtggtgctgcagagcgtgagcccctggcgcgccgacgtgtacttcaacaagaccaccggcaagtacgagatcctgggcctgaagtacgccgacctgcagtttgataagggcaccggcacctacaagatcagccaggagaagtacaacgacatcaagaagaaggagggcgtggacagcgacagcgagttcaagttcaccctgtacaagaacgaccttctgctggtgaaggacaccgagaccaaggagcaacagctgttccgcttcctgagccgcaccatgcccaagcagaagcactacgtggagctgaagccctacgacaagcagaagttcgagggcggcgaggccctgatcaaggtgctgggcaacgtggccaacagcggccagtgcaagaagggcctgggcaagagcaacatcagcatctacaaggtgcgcaccgacgtgctgggcaaccagcacatcatcaagaacgagggcgacaagcccaagctggacttcagcagggctgaccccaagaagaagaggaaggtggaggccagcggttccggacgggctgacgcattggacgattttgatctggatatgctgggaagtgacgccctcgatgattttgaccttgacatgcttggttcggatgcccttgatgactttgacctcgacatgctcggcagtgacgcccttgatgatttcgacctggacatgctgattaactctagatga

SEQ ID NO: 16 - DNA, 3366 bp, Streptococcus thermophilus
atgagtgacttagttttaggacttgatatcggtataggttctgttggtgtaggtatccttaacaaagtgacaggagaaattatccataaaaactcacgcatcttcccagcagctcaagcggaaaataacctagtacgtagaacgaatcgtcaaggaagacgcttgacacgacgtaaaaaacatcgtagagttcgtttaaatcgtctatttgaggaaagtggattaatcaccgattttacgaagatttcaattaatcttaacccatatcaattacgagttaagggcttgaccgatgaattgtctaatgaagaactgtttatcgctcttaaaaatatggtgaaacaccgtgggattagttacctcgatgatgctagtgatgacggaaattcatcaataggagactatgcacaaattgttaaggaaaatagtaaacaattagaaactaagacaccgggacagatacagttggaacgctaccaaacatatggtcaattacgtggtgattttactgttgagaaagatggcaaaaaacatcgcttgattaatgtctttccaacatcagcttatcgttcagaagccttaaggatactgcaaactcaacaagaatttaatccacagattacagatgaatttattaatcgttatctcgaaattttaactggaaaacggaaatattatcatggacccggaaatgaaaagtcacggactgattatggtcgttacagaacgagtggagaaactttagacaatatttttggaattctaattgggaaatgtacattttatccagacgagtttagagcagcaaaagcttcctacacggctcaagaattcaatttgctaaatgatttgaacaatctaacagttcctactgaaaccaaaaagttgagcaaagaacagaagaatcaaatcattaattatgtcaaaaatgaaaaggcaatggggccagcgaaactttttaaatatatcgctaagttactttcttgtgatgttgcagatatcaagggataccgtatcgacaaatcaggtaaggctgagattcatactttcgaagcctatcgaaaaatgaaaacgcttgaaaccttagatattgagcaaatggatagagaaacgcttgataaattagcctatgtcttaacattaaacactgagagggaaggtattcaagaagccttagaacatgaatttgctgatggtagctttagccagaagcaagttgacgaattggttcaattccgcaaagcaaatagttccatttttggaaaaggatggcataatttttctgtcaaactgatgatggagttaattccagaattgtatgagacgtcagaagagcaaatgactatcctaacacgacttggaaaacaaaaaacgacttcgtcttcaaataaaacaaaatatatagatgaaaaactattaactgaagaaatctataatcctgttgttgctaagtctgttcgccaggctataaaaatcgtaaatgcggcgattaaagaatacggagactttgacaatattgtcatcgaaatggctcgtgaaacaaatgaagatgatgaaaagaaagctattcaaaagattcaaaaagccaacaaagatgaaaaagatgcagcaatgcttaaggctgctaaccaatataatggaaaggctgaattaccacatagtgttttccacggtcataagcaattagcgactaaaatccgcctttggcatcagcaaggagaacgttgcctttatactggtaagacaatctcaatccatgatttgataaataattctaatcagtttgaagtagatcatattttacctctttctatcacattcgatgatagccttgcaaataaggttttggtttatgcaactgctaaccaagaaaaaggacaacgaacaccttatcaggctttagatagtatggatgatgcgtggtctttccgtgaattaaaagcttttgtacgtgagtcaaaaacactttcgaacaagaaaaaagaatacctccttacagaagaagatatttcaaagtttgatgttcgaaagaaatttattgaacgaaatcttgtagatacaagatacgcttcaagagttgtcctcaatgcccttcaagaacactttagagctcacaagattgatacaaaagtttccgtggttcgtggccaatttacatctcaattgagacgccattggggaattgagaagactcgtgatacttatcatcaccatgctgtcgatgcattgattattgccgcctcaagtcagttgaatttgtggaaaaaacaaaagaatacccttgtaagttattcagaagaccaactccttgatattgaaacaggtgaacttattagtgatgatgagtacaaggaatctgtgttcaaagccccttatcaacattttgttgatacattgaagagtaaagaatttgaagacagtatcttattctcttatcaagtggattctaagtttaatcgtaaaatatcagatgccactatttatgcgacaagacaggctaaagtaggaaaagataaggcggatgaaacttatgtcttagggaaaatcaaagatatttatactcaggatggttatgatgcctttatgaagatttataagaaggataagtcaaaattcctcatgtatcgtcacgacccacaaacctttgagaaagttatcgagccaattttagagaactatcctaataagcaaataaatgaaaaagggaaagaggtaccatgtaatcctttcctaaaatataaagaagaacatggctatattcgtaaatatagtaaaaaaggcaatggtcctgaaatcaagagtcttaaatactatgatagtaagctaggcaatcatattgatattactccgaaggatagtaacaataaagttgtcttacagtcagtttctccatggagagcggatgtctatttcaataagactactggaaaatacgaaatcctcggattgaaatatgctgatttacaatttgaaaaagggacaggaacatataagatttcccaggaaaaatacaatgacattaagaaaaaagagggtgtagattctgattcagaattcaagtttacactttataaaaatgatttgttactcgttaaagatacagaaacaaaagaacaacagcttttccgttttctttctcgaactatgcctaaacaaaagcattatgttgaattaaaaccttatgataaacagaaatttgaaggaggtgaggcgttaattaaagtgttgggtaacgttgctaatagtggtcaatgcaaaaaagggctaggaaaatcaaatatttctatttataaggtaagaacagatgtcctaggaaatcagcatatcatcaaaaatgagggtgataagcctaagctagatttttaa

SEQ ID NO: 17 - DNA, 4167 bp, Streptococcus thermophilus; identical to SEQ ID NO: 9

SEQ ID NO: 18 - DNA, 3249 bp, Neisseria meningitidis
atggccgccttcaagcccaaccccatcaactacatcctgggcctggacatcggcatcgccagcgtgggctgggccatggtggagatcgacgaggacgagaaccccatctgcctgatcgacctgggtgtgcgcgtgttcgagcgcgctgaggtgcccaagactggtgacagtctggctatggctcgccggcttgctcgctctgttcggcgccttactcgccggcgcgctcaccgccttctgcgcgctcgccgcctgctgaagcgcgagggtgtgctgcaggctgccgacttcgacgagaacggcctgatcaagagcctgcccaacactccttggcagctgcgcgctgccgctctggaccgcaagctgactcctctggagtggagcgccgtgctgctgcacctgatcaagcaccgcggctacctgagccagcgcaagaacgagggcgagaccgccgacaaggagctgggtgctctgctgaagggcgtggccgacaacgcccacgccctgcagactggtgacttccgcactcctgctgagctggccctgaacaagttcgagaaggagagcggccacatccgcaaccagcgcggcgactacagccacaccttcagccgcaaggacctgcaggccgagctgatcctgctgttcgagaagcagaaggagttcggcaacccccacgtgagcggcggcctgaaggagggcatcgagaccctgctgatgacccagcgccccgccctgagcggcgacgccgtgcagaagatgctgggccactgcaccttcgagccagccgagcccaaggccgccaagaacacctacaccgccgagcgcttcatctggctgaccaagctgaacaacctgcgcatcctggagcagggcagcgagcgccccctgaccgacaccgagcgcgccaccctgatggacgagccctaccgcaagagcaagctgacctacgcccaggcccgcaagctgctgggtctggaggacaccgccttcttcaagggcctgcgctacggcaaggacaacgccgaggccagcaccctgatggagatgaaggcctaccacgccatcagccgcgccctggagaaggagggcctgaaggacaagaagagtcctctgaacctgagccccgagctgcaggacgagatcggcaccgccttcagcctgttcaagaccgacgaggacatcaccggccgcctgaaggaccgcatccagcccgagatcctggaggccctgctgaagcacatcagcttcgacaagttcgtgcagatcagcctgaaggccctgcgccgcatcgtgcccctgatggagcagggcaagcgctacgacgaggcctgcgccgagatctacggcgaccactacggcaagaagaacaccgaggagaagatctacctgcctcctatccccgccgacgagatccgcaaccccgtggtgctgcgcgccctgagccaggcccgcaaggtgatcaacggcgtggtgcgccgctacggcagccccgcccgcatccacatcgagaccgcccgcgaggtgggcaagagcttcaaggaccgcaaggagatcgagaagcgccaggaggagaaccgcaaggaccgcgagaaggccgccgccaagttccgcgagtacttccccaacttcgtgggcgagcccaagagcaaggacatcctgaagctgcgcctgtacgagcagcagcacggcaagtgcctgtacagcggcaaggagatcaacctgggccgcctgaacgagaagggctacgtggagatcgaccacgccctgcccttcagccgcacctgggacgacagcttcaacaacaaggtgctggtgctgggcagcgagaaccagaacaagggcaaccagaccccctacgagtacttcaacggcaaggacaacagccgcgagtggcaggagttcaaggcccgcgtggagaccagccgcttcccccgcagcaagaagcagcgcatcctgctgcagaagttcgacgaggacggcttcaaggagcgcaacctgaacgacacccgctacgtgaaccgcttcctgtgccagttcgtggccgaccgcatgcgcctgaccggcaagggcaagaagcgcgtgttcgccagcaacggccagatcaccaacctgctgcgcggcttctggggcctgcgcaaggtgcgcgccgagaacgaccgccaccacgccctggacgccgtggtggtggcctgcagcaccgtggccatgcagcagaagatcacccgcttcgtgcgctacaaggagatgaacgccttcgacggtaaaaccatcgacaaggagaccggcgaggtgctgcaccagaagacccacttcccccagccctgggagttcttcgcccaggaggtgatgatccgcgtgttcggcaagcccgacggcaagcccgagttcgaggaggccgacacccccgagaagctgcgcaccctgctggccgagaagctgagcagccgccctgaggccgtgcacgagtacgtgactcctctgttcgtgagccgcgcccccaaccgcaagatgagcggtcagggtcacatggagaccgtgaagagcgccaagcgcctggacgagggcgtgagcgtgctgcgcgtgcccctgacccagctgaagctgaaggacctggagaagatggtgaaccgcgagcgcgagcccaagctgtacgaggccctgaaggcccgcctggaggcccacaaggacgaccccgccaaggccttcgccgagcccttctacaagtacgacaaggccggcaaccgcacccagcaggtgaaggccgtgcgcgtggagcaggtgcagaagaccggcgtgtgggtgcgcaaccacaacggcatcgccgacaacgccaccatggtgcgcgtggacgtgttcgagaagggcgacaagtactacctggtgcccatctacagctggcaggtggccaagggcatcctgcccgaccgcgccgtggtgcagggcaaggacgaggaggactggcagctgatcgacgacagcttcaacttcaagttcagcctgcaccccaacgacctggtggaggtgatcaccaagaaggcccgcatgttcggctacttcgccagctgccaccgcggcaccggcaacatcaacatccgcatccacgacctggaccacaagatcggcaagaacggcatcctggagggcatcggcgtgaagaccgccctgagcttccagaagtaccagatcgacgagctgggcaaggagatccgcccctgccgcctgaagaagcgccctcctgtgcgctaa

SEQ ID NO: 19 - DNA, 3249 bp, Neisseria meningitidis
atggccgccttcaagcccaaccccatcaactacatcctgggcctggccatcggcatcgccagcgtgggctgggccatggtggagatcgacgaggacgagaaccccatctgcctgatcgacctgggtgtgcgcgtgttcgagcgcgctgaggtgcccaagactggtgacagtctggctatggctcgccggcttgctcgctctgttcggcgccttactcgccggcgcgctcaccgccttctgcgcgctcgccgcctgctgaagcgcgagggtgtgctgcaggctgccgacttcgacgagaacggcctgatcaagagcctgcccaacactccttggcagctgcgcgctgccgctctggaccgcaagctgactcctctggagtggagcgccgtgctgctgcacctgatcaagcaccgcggctacctgagccagcgcaagaacgagggcgagaccgccgacaaggagctgggtgctctgctgaagggcgtggccgacaacgcccacgccctgcagactggtgacttccgcactcctgctgagctggccctgaacaagttcgagaaggagagcggccacatccgcaaccagcgcggcgactacagccacaccttcagccgcaaggacctgcaggccgagctgatcctgctgttcgagaagcagaaggagttcggcaacccccacgtgagcggcggcctgaaggagggcatcgagaccctgctgatgacccagcgccccgccctgagcggcgacgccgtgcagaagatgctgggccactgcaccttcgagccagccgagcccaaggccgccaagaacacctacaccgccgagcgcttcatctggctgaccaagctgaacaacctgcgcatcctggagcagggcagcgagcgccccctgaccgacaccgagcgcgccaccctgatggacgagccctaccgcaagagcaagctgacctacgcccaggcccgcaagctgctgggtctggaggacaccgccttcttcaagggcctgcgctacggcaaggacaacgccgaggccagcaccctgatggagatgaaggcctaccacgccatcagccgcgccctggagaaggagggcctgaaggacaagaagagtcctctgaacctgagccccgagctgcaggacgagatcggcaccgccttcagcctgttcaagaccgacgaggacatcaccggccgcctgaaggaccgcatccagcccgagatcctggaggccctgctgaagcacatcagcttcgacaagttcgtgcagatcagcctgaaggccctgcgccgcatcgtgcccctgatggagcagggcaagcgctacgacgaggcctgcgccgagatctacggcgaccactacggcaagaagaacaccgaggagaagatctacctgcctcctatccccgccgacgagatccgcaaccccgtggtgctgcgcgccctgagccaggcccgcaaggtgatcaacggcgtggtgcgccgctacggcagccccgcccgcatccacatcgagaccgcccgcgaggtgggcaagagcttcaaggaccgcaaggagatcgagaagcgccaggaggagaaccgcaaggaccgcgagaaggccgccgccaagttccgcgagtacttccccaacttcgtgggcgagcccaagagcaaggacatcctgaagctgcgcctgtacgagcagcagcacggcaagtgcctgtacagcggcaaggagatcaacctgggccgcctgaacgagaagggctacgtggagatcgccgctgccctgcccttcagccgcacctgggacgacagcttcaacaacaaggtgctggtgctgggcagcgaggctcagaacaagggcaaccagaccccctacgagtacttcaacggcaaggacaacagccgcgagtggcaggagttcaaggcccgcgtggagaccagccgcttcccccgcagcaagaagcagcgcatcctgctgcagaagttcgacgaggacggcttcaaggagcgcaacctgaacgacacccgctacgtgaaccgcttcctgtgccagttcgtggccgaccgcatgcgcctgaccggcaagggcaagaagcgcgtgttcgccagcaacggccagatcaccaacctgctgcgcggcttctggggcctgcgcaaggtgcgcgccgagaacgaccgccaccacgccctggacgccgtggtggtggcctgcagcaccgtggccatgcagcagaagatcacccgcttcgtgcgctacaaggagatgaacgccttcgacggtaaaaccatcgacaaggagaccggcgaggtgctgcaccagaagacccacttcccccagccctgggagttcttcgcccaggaggtgatgatccgcgtgttcggcaagcccgacggcaagcccgagttcgaggaggccgacacccccgagaagctgcgcaccctgctggccgagaagctgagcagccgccctgaggccgtgcacgagtacgtgactcctctgttcgtgagccgcgcccccaaccgcaagatgagcggtcagggtcacatggagaccgtgaagagcgccaagcgcctggacgagggcgtgagcgtgctgcgcgtgcccctgacccagctgaagctgaaggacctggagaagatggtgaaccgcgagcgcgagcccaagctgtacgaggccctgaaggcccgcctggaggcccacaaggacgaccccgccaaggccttcgccgagcccttctacaagtacgacaaggccggcaaccgcacccagcaggtgaaggccgtgcgcgtggagcaggtgcagaagaccggcgtgtgggtgcgcaaccacaacggcatcgccgacaacgccaccatggtgcgcgtggacgtgttcgagaagggcgacaagtactacctggtgcccatctacagctggcaggtggccaagggcatcctgcccgaccgcgccgtggtgcagggcaaggacgaggaggactggcagctgatcgacgacagcttcaacttcaagttcagcctgcaccccaacgacctggtggaggtgatcaccaagaaggcccgcatgttcggctacttcgccagctgccaccgcggcaccggcaacatcaacatccgcatccacgacctggaccacaagatcggcaagaacggcatcctggagggcatcggcgtgaagaccgccctgagcttccagaagtaccagatcgacgagctgggcaaggagatccgcccctgccgcctgaagaagcgccctcctgtgcgctaa

SEQ ID NO: 20 - DNA, 3282 bp, Neisseria meningitidis
atggccgccttcaagcccaaccccatcaactacatcctgggcctggacatcggcatcgccagcgtgggctgggccatggtggagatcgacgaggacgagaaccccatctgcctgatcgacctgggtgtgcgcgtgttcgagcgcgctgaggtgcccaagactggtgacagtctggctatggctcgccggcttgctcgctctgttcggcgccttactcgccggcgcgctcaccgccttctgcgcgctcgccgcctgctgaagcgcgagggtgtgctgcaggctgccgacttcgacgagaacggcctgatcaagagcctgcccaacactccttggcagctgcgcgctgccgctctggaccgcaagctgactcctctggagtggagcgccgtgctgctgcacctgatcaagcaccgcggctacctgagccagcgcaagaacgagggcgagaccgccgacaaggagctgggtgctctgctgaagggcgtggccgacaacgcccacgccctgcagactggtgacttccgcactcctgctgagctggccctgaacaagttcgagaaggagagcggccacatccgcaaccagcgcggcgactacagccacaccttcagccgcaaggacctgcaggccgagctgatcctgctgttcgagaagcagaaggagttcggcaacccccacgtgagcggcggcctgaaggagggcatcgagaccctgctgatgacccagcgccccgccctgagcggcgacgccgtgcagaagatgctgggccactgcaccttcgagccagccgagcccaaggccgccaagaacacctacaccgccgagcgcttcatctggctgaccaagctgaacaacctgcgcatcctggagcagggcagcgagcgccccctgaccgacaccgagcgcgccaccctgatggacgagccctaccgcaagagcaagctgacctacgcccaggcccgcaagctgctgggtctggaggacaccgccttcttcaagggcctgcgctacggcaaggacaacgccgaggccagcaccctgatggagatgaaggcctaccacgccatcagccgcgccctggagaaggagggcctgaaggacaagaagagtcctctgaacctgagccccgagctgcaggacgagatcggcaccgccttcagcctgttcaagaccgacgaggacatcaccggccgcctgaaggaccgcatccagcccgagatcctggaggccctgctgaagcacatcagcttcgacaagttcgtgcagatcagcctgaaggccctgcgccgcatcgtgcccctgatggagcagggcaagcgctacgacgaggcctgcgccgagatctacggcgaccactacggcaagaagaacaccgaggagaagatctacctgcctcctatccccgccgacgagatccgcaaccccgtggtgctgcgcgccctgagccaggcccgcaaggtgatcaacggcgtggtgcgccgctacggcagccccgcccgcatccacatcgagaccgcccgcgaggtgggcaagagcttcaaggaccgcaaggagatcgagaagcgccaggaggagaaccgcaaggaccgcgagaaggccgccgccaagttccgcgagtacttccccaacttcgtgggcgagcccaagagcaaggacatcctgaagctgcgcctgtacgagcagcagcacggcaagtgcctgtacagcggcaaggagatcaacctgggccgcctgaacgagaagggctacgtggagatcgaccacgccctgcccttcagccgcacctgggacgacagcttcaacaacaaggtgctggtgctgggcagcgagaaccagaacaagggcaaccagaccccctacgagtacttcaacggcaaggacaacagccgcgagtggcaggagttcaaggcccgcgtggagaccagccgcttcccccgcagcaagaagcagcgcatcctgctgcagaagttcgacgaggacggcttcaaggagcgcaacctgaacgacacccgctacgtgaaccgcttcctgtgccagttcgtggccgaccgcatgcgcctgaccggcaagggcaagaagcgcgtgttcgccagcaacggccagatcaccaacctgctgcgcggcttctggggcctgcgcaaggtgcgcgccgagaacgaccgccaccacgccctggacgccgtggtggtggcctgcagcaccgtggccatgcagcagaagatcacccgcttcgtgcgctacaaggagatgaacgccttcgacggtaaaaccatcgacaaggagaccggcgaggtgctgcaccagaagacccacttcccccagccctgggagttcttcgcccaggaggtgatgatccgcgtgttcggcaagcccgacggcaagcccgagttcgaggaggccgacacccccgagaagctgcgcaccctgctggccgagaagctgagcagccgccctgaggccgtgcacgagtacgtgactcctctgttcgtgagccgcgcccccaaccgcaagatgagcggtcagggtcacatggagaccgtgaagagcgccaagcgcctggacgagggcgtgagcgtgctgcgcgtgcccctgacccagctgaagctgaaggacctggagaagatggtgaaccgcgagcgcgagcccaagctgtacgaggccctgaaggcccgcctggaggcccacaaggacgaccccgccaaggccttcgccgagcccttctacaagtacgacaaggccggcaaccgcacccagcaggtgaaggccgtgcgcgtggagcaggtgcagaagaccggcgtgtgggtgcgcaaccacaacggcatcgccgacaacgccaccatggtgcgcgtggacgtgttcgagaagggcgacaagtactacctggtgcccatctacagctggcaggtggccaagggcatcctgcccgaccgcgccgtggtgcagggcaaggacgaggaggactggcagctgatcgacgacagcttcaacttcaagttcagcctgcaccccaacgacctggtggaggtgatcaccaagaaggcccgcatgttcggctacttcgccagctgccaccgcggcaccggcaacatcaacatccgcatccacgacctggaccacaagatcggcaagaacggcatcctggagggcatcggcgtgaagaccgccctgagcttccagaagtaccagatcgacgagctgggcaaggagatccgcccctgccgcctgaagaagcgccctcctgtgcgcagcagggctgaccccaagaagaagaggaaggtgtga

SEQ ID NO: 21 - DNA, 3342 bp, Neisseria meningitidis
atggccgccttcaagcccaaccccatcaactacatcctgggcctggacatcggcatcgccagcgtgggctgggccatggtggagatcgacgaggacgagaaccccatctgcctgatcgacctgggtgtgcgcgtgttcgagcgcgctgaggtgcccaagactggtgacagtctggctatggctcgccggcttgctcgctctgttcggcgccttactcgccggcgcgctcaccgccttctgcgcgctcgccgcctgctgaagcgcgagggtgtgctgcaggctgccgacttcgacgagaacggcctgatcaagagcctgcccaacactccttggcagctgcgcgctgccgctctggaccgcaagctgactcctctggagtggagcgccgtgctgctgcacctgatcaagcaccgcggctacctgagccagcgcaagaacgagggcgagaccgccgacaaggagctgggtgctctgctgaagggcgtggccgacaacgcccacgccctgcagactggtgacttccgcactcctgctgagctggccctgaacaagttcgagaaggagagcggccacatccgcaaccagcgcggcgactacagccacaccttcagccgcaaggacctgcaggccgagctgatcctgctgttcgagaagcagaaggagttcggcaacccccacgtgagcggcggcctgaaggagggcatcgagaccctgctgatgacccagcgccccgccctgagcggcgacgccgtgcagaagatgctgggccactgcaccttcgagccagccgagcccaaggccgccaagaacacctacaccgccgagcgcttcatctggctgaccaagctgaacaacctgcgcatcctggagcagggcagcgagcgccccctgaccgacaccgagcgcgccaccctgatggacgagccctaccgcaagagcaagctgacctacgcccaggcccgcaagctgctgggtctggaggacaccgccttcttcaagggcctgcgctacggcaaggacaacgccgaggccagcaccctgatggagatgaaggcctaccacgccatcagccgcgccctggagaaggagggcctgaaggacaagaagagtcctctgaacctgagccccgagctgcaggacgagatcggcaccgccttcagcctgttcaagaccgacgaggacatcaccggccgcctgaaggaccgcatccagcccgagatcctggaggccctgctgaagcacatcagcttcgacaagttcgtgcagatcagcctgaaggccctgcgccgcatcgtgcccctgatggagcagggcaagcgctacgacgaggcctgcgccgagatctacggcgaccactacggcaagaagaacaccgaggagaagatctacctgcctcctatccccgccgacgagatccgcaaccccgtggtgctgcgcgccctgagccaggcccgcaaggtgatcaacggcgtggtgcgccgctacggcagccccgcccgcatccacatcgagaccgcccgcgaggtgggcaagagcttcaaggaccgcaaggagatcgagaagcgccaggaggagaaccgcaaggaccgcgagaaggccgccgccaagttccgcgagtacttccccaacttcgtgggcgagcccaagagcaaggacatcctgaagctgcgcctgtacgagcagcagcacggcaagtgcctgtacagcggcaaggagatcaacctgggccgcctgaacgagaagggctacgtggagatcgaccacgccctgcccttcagccgcacctgggacgacagcttcaacaacaaggtgctggtgctgggcagcgagaaccagaacaagggcaaccagaccccctacgagtacttcaacggcaaggacaacagccgcgagtggcaggagttcaaggcccgcgtggagaccagccgcttcccccgcagcaagaagcagcgcatcctgctgcagaagttcgacgaggacggcttcaaggagcgcaacctgaacgacacccgctacgtgaaccgcttcctgtgccagttcgtggccgaccgcatgcgcctgaccggcaagggcaagaagcgcgtgttcgccagcaacggccagatcaccaacctgctgcgcggcttctggggcctgcgcaaggtgcgcgccgagaacgaccgccaccacgccctggacgccgtggtggtggcctgcagcaccgtggccatgcagcagaagatcacccgcttcgtgcgctacaaggagatgaacgccttcgacggtaaaaccatcgacaaggagaccggcgaggtgctgcaccagaagacccacttcccccagccctgggagttcttcgcccaggaggtgatgatccgcgtgttcggcaagcccgacggcaagcccgagttcgaggaggccgacacccccgagaagctgcgcaccctgctggccgagaagctgagcagccgccctgaggccgtgcacgagtacgtgactcctctgttcgtgagccgcgcccccaaccgcaagatgagcggtcagggtcacatggagaccgtgaagagcgccaagcgcctggacgagggcgtgagcgtgctgcgcgtgcccctgacccagctgaagctgaaggacctggagaagatggtgaaccgcgagcgcgagcccaagctgtacgaggccctgaaggcccgcctggaggcccacaaggacgaccccgccaaggccttcgccgagcccttctacaagtacgacaaggccggcaaccgcacccagcaggtgaaggccgtgcgcgtggagcaggtgcagaagaccggcgtgtgggtgcgcaaccacaacggcatcgccgacaacgccaccatggtgcgcgtggacgtgttcgagaagggcgacaagtactacctggtgcccatctacagctggcaggtggccaagggcatcctgcccgaccgcgccgtggtgcagggcaaggacgaggaggactggcagctgatcgacgacagcttcaacttcaagttcagcctgcaccccaacgacctggtggaggtgatcaccaagaaggcccgcatgttcggctacttcgccagctgccaccgcggcaccggcaacatcaacatccgcatccacgacctggaccacaagatcggcaagaacggcatcctggagggcatcggcgtgaagaccgccctgagcttccagaagtaccagatcgacgagctgggcaaggagatccgcccctgccgcctgaagaagcgccctcctgtgcgcgcggccgcagatccaaaaaagaagagaaaggtagatccaaaaaagaagagaaaggtagatccaaaaaagaagagaaaggtagatacggccgcatag

SEQ ID NO: 22 - DNA, 3468 bp, Neisseria meningitidis
atggccgccttcaagcccaaccccatcaactacatcctgggcctggccatcggcatcgccagcgtgggctgggccatggtggagatcgacgaggacgagaaccccatctgcctgatcgacctgggtgtgcgcgtgttcgagcgcgctgaggtgcccaagactggtgacagtctggctatggctcgccggcttgctcgctctgttcggcgccttactcgccggcgcgctcaccgccttctgcgcgctcgccgcctgctgaagcgcgagggtgtgctgcaggctgccgacttcgacgagaacggcctgatcaagagcctgcccaacactccttggcagctgcgcgctgccgctctggaccgcaagctgactcctctggagtggagcgccgtgctgctgcacctgatcaagcaccgcggctacctgagccagcgcaagaacgagggcgagaccgccgacaaggagctgggtgctctgctgaagggcgtggccgacaacgcccacgccctgcagactggtgacttccgcactcctgctgagctggccctgaacaagttcgagaaggagagcggccacatccgcaaccagcgcggcgactacagccacaccttcagccgcaaggacctgcaggccgagctgatcctgctgttcgagaagcagaaggagttcggcaacccccacgtgagcggcggcctgaaggagggcatcgagaccctgctgatgacccagcgccccgccctgagcggcgacgccgtgcagaagatgctgggccactgcaccttcgagccagccgagcccaaggccgccaagaacacctacaccgccgagcgcttcatctggctgaccaagctgaacaacctgcgcatcctggagcagggcagcgagcgccccctgaccgacaccgagcgcgccaccctgatggacgagccctaccgcaagagcaagctgacctacgcccaggcccgcaagctgctgggtctggaggacaccgccttcttcaagggcctgcgctacggcaaggacaacgccgaggccagcaccctgatggagatgaaggcctaccacgccatcagccgcgccctggagaaggagggcctgaaggacaagaagagtcctctgaacctgagccccgagctgcaggacgagatcggcaccgccttcagcctgttcaagaccgacgaggacatcaccggccgcctgaaggaccgcatccagcccgagatcctggaggccctgctgaagcacatcagcttcgacaagttcgtgcagatcagcctgaaggccctgcgccgcatcgtgcccctgatggagcagggcaagcgctacgacgaggcctgcgccgagatctacggcgaccactacggcaagaagaacaccgaggagaagatctacctgcctcctatccccgccgacgagatccgcaaccccgtggtgctgcgcgccctgagccaggcccgcaaggtgatcaacggcgtggtgcgccgctacggcagccccgcccgcatccacatcgagaccgcccgcgaggtgggcaagagcttcaaggaccgcaaggagatcgagaagcgccaggaggagaaccgcaaggaccgcgagaaggccgccgccaagttccgcgagtacttccccaacttcgtgggcgagcccaagagcaaggacatcctgaagctgcgcctgtacgagcagcagcacggcaagtgcctgtacagcggcaaggagatcaacctgggccgcctgaacgagaagggctacgtggagatcgccgctgccctgcccttcagccgcacctgggacgacagcttcaacaacaaggtgctggtgctgggcagcgaggctcagaacaagggcaaccagaccccctacgagtacttcaacggcaaggacaacagccgcgagtggcaggagttcaaggcccgcgtggagaccagccgcttcccccgcagcaagaagcagcgcatcctgctgcagaagttcgacgaggacggcttcaaggagcgcaacctgaacgacacccgctacgtgaaccgcttcctgtgccagttcgtggccgaccgcatgcgcctgaccggcaagggcaagaagcgcgtgttcgccagcaacggccagatcaccaacctgctgcgcggcttctggggcctgcgcaaggtgcgcgccgagaacgaccgccaccacgccctggacgccgtggtggtggcctgcagcaccgtggccatgcagcagaagatcacccgcttcgtgcgctacaaggagatgaacgccttcgacggtaaaaccatcgacaaggagaccggcgaggtgctgcaccagaagacccacttcccccagccctgggagttcttcgcccaggaggtgatgatccgcgtgttcggcaagcccgacggcaagcccgagttcgaggaggccgacacccccgagaagctgcgcaccctgctggccgagaagctgagcagccgccctgaggccgtgcacgagtacgtgactcctctgttcgtgagccgcgcccccaaccgcaagatgagcggtcagggtcacatggagaccgtgaagagcgccaagcgcctggacgagggcgtgagcgtgctgcgcgtgcccctgacccagctgaagctgaaggacctggagaagatggtgaaccgcgagcgcgagcccaagctgtacgaggccctgaaggcccgcctggaggcccacaaggacgaccccgccaaggccttcgccgagcccttctacaagtacgacaaggccggcaaccgcacccagcaggtgaaggccgtgcgcgtggagcaggtgcagaagaccggcgtgtgggtgcgcaaccacaacggcatcgccgacaacgccaccatggtgcgcgtggacgtgttcgagaagggcgacaagtactacctggtgcccatctacagctggcaggtggccaagggcatcctgcccgaccgcgccgtggtgcagggcaaggacgaggaggactggcagctgatcgacgacagcttcaacttcaagttcagcctgcaccccaacgacctggtggaggtgatcaccaagaaggcccgcatgttcggctacttcgccagctgccaccgcggcaccggcaacatcaacatccgcatccacgacctggaccacaagatcggcaagaacggcatcctggagggcatcggcgtgaagaccgccctgagcttccagaagtaccagatcgacgagctgggcaaggagatccgcccctgccgcctgaagaagcgccctcctgtgcgcagcagggctgaccccaagaagaagaggaaggtggaggccagcggttccggacgggctgacgcattggacgattttgatctggatatgctgggaagtgacgccctcgatgattttgaccttgacatgcttggttcggatgcccttgatgactttgacctcgacatgctcggcagtgacgcccttgatgatttcgacctggacatgctgattaactctagatga

SEQ ID NO: 23 - DNA, 3489 bp, Neisseria meningitidis
atgcccaagaagaagaggaaggtggccgccttcaagcccaaccccatcaactacatcctgggcctggccatcggcatcgccagcgtgggctgggccatggtggagatcgacgaggacgagaaccccatctgcctgatcgacctgggtgtgcgcgtgttcgagcgcgctgaggtgcccaagactggtgacagtctggctatggctcgccggcttgctcgctctgttcggcgccttactcgccggcgcgctcaccgccttctgcgcgctcgccgcctgctgaagcgcgagggtgtgctgcaggctgccgacttcgacgagaacggcctgatcaagagcctgcccaacactccttggcagctgcgcgctgccgctctggaccgcaagctgactcctctggagtggagcgccgtgctgctgcacctgatcaagcaccgcggctacctgagccagcgcaagaacgagggcgagaccgccgacaaggagctgggtgctctgctgaagggcgtggccgacaacgcccacgccctgcagactggtgacttccgcactcctgctgagctggccctgaacaagttcgagaaggagagcggccacatccgcaaccagcgcggcgactacagccacaccttcagccgcaaggacctgcaggccgagctgatcctgctgttcgagaagcagaaggagttcggcaacccccacgtgagcggcggcctgaaggagggcatcgagaccctgctgatgacccagcgccccgccctgagcggcgacgccgtgcagaagatgctgggccactgcaccttcgagccagccgagcccaaggccgccaagaacacctacaccgccgagcgcttcatctggctgaccaagctgaacaacctgcgcatcctggagcagggcagcgagcgccccctgaccgacaccgagcgcgccaccctgatggacgagccctaccgcaagagcaagctgacctacgcccaggcccgcaagctgctgggtctggaggacaccgccttcttcaagggcctgcgctacggcaaggacaacgccgaggccagcaccctgatggagatgaaggcctaccacgccatcagccgcgccctggagaaggagggcctgaaggacaagaagagtcctctgaacctgagccccgagctgcaggacgagatcggcaccgccttcagcctgttcaagaccgacgaggacatcaccggccgcctgaaggaccgcatccagcccgagatcctggaggccctgctgaagcacatcagcttcgacaagttcgtgcagatcagcctgaaggccctgcgccgcatcgtgcccctgatggagcagggcaagcgctacgacgaggcctgcgccgagatctacggcgaccactacggcaagaagaacaccgaggagaagatctacctgcctcctatccccgccgacgagatccgcaaccccgtggtgctgcgcgccctgagccaggcccgcaaggtgatcaacggcgtggtgcgccgctacggcagccccgcccgcatccacatcgagaccgcccgcgaggtgggcaagagcttcaaggaccgcaaggagatcgagaagcgccaggaggagaaccgcaaggaccgcgagaaggccgccgccaagttccgcgagtacttccccaacttcgtgggcgagcccaagagcaaggacatcctgaagctgcgcctgtacgagcagcagcacggcaagtgcctgtacagcggcaaggagatcaacctgggccgcctgaacgagaagggctacgtggagatcgccgctgccctgcccttcagccgcacctgggacgacagcttcaacaacaaggtgctggtgctgggcagcgaggctcagaacaagggcaaccagaccccctacgagtacttcaacggcaaggacaacagccgcgagtggcaggagttcaaggcccgcgtggagaccagccgcttcccccgcagcaagaagcagcgcatcctgctgcagaagttcgacgaggacggcttcaaggagcgcaacctgaacgacacccgctacgtgaaccgcttcctgtgccagttcgtggccgaccgcatgcgcctgaccggcaagggcaagaagcgcgtgttcgccagcaacggccagatcaccaacctgctgcgcggcttctggggcctgcgcaaggtgcgcgccgagaacgaccgccaccacgccctggacgccgtggtggtggcctgcagcaccgtggccatgcagcagaagatcacccgcttcgtgcgctacaaggagatgaacgccttcgacggtaaaaccatcgacaaggagaccggcgaggtgctgcaccagaagacccacttcccccagccctgggagttcttcgcccaggaggtgatgatccgcgtgttcggcaagcccgacggcaagcccgagttcgaggaggccgacacccccgagaagctgcgcaccctgctggccgagaagctgagcagccgccctgaggccgtgcacgagtacgtgactcctctgttcgtgagccgcgcccccaaccgcaagatgagcggtcagggtcacatggagaccgtgaagagcgccaagcgcctggacgagggcgtgagcgtgctgcgcgtgcccctgacccagctgaagctgaaggacctggagaagatggtgaaccgcgagcgcgagcccaagctgtacgaggccctgaaggcccgcctggaggcccacaaggacgaccccgccaaggccttcgccgagcccttctacaagtacgacaaggccggcaaccgcacccagcaggtgaaggccgtgcgcgtggagcaggtgcagaagaccggcgtgtgggtgcgcaaccacaacggcatcgccgacaacgccaccatggtgcgcgtggacgtgttcgagaagggcgacaagtactacctggtgcccatctacagctggcaggtggccaagggcatcctgcccgaccgcgccgtggtgcagggcaaggacgaggaggactggcagctgatcgacgacagcttcaacttcaagttcagcctgcaccccaacgacctggtggaggtgatcaccaagaaggcccgcatgttcggctacttcgccagctgccaccgcggcaccggcaacatcaacatccgcatccacgacctggaccacaagatcggcaagaacggcatcctggagggcatcggcgtgaagaccgccctgagcttccagaagtaccagatcgacgagctgggcaaggagatccgcccctgccgcctgaagaagcgccctcctgtgcgcagcagggctgaccccaagaagaagaggaaggtggaggccagcggttccggacgggctgacgcattggacgattttgatctggatatgctgggaagtgacgccctcgatgattttgaccttgacatgcttggttcggatgcccttgatgactttgacctcgacatgctcggcagtgacgcccttgatgatttcgacctggacatgctgattaactctagatga

SEQ ID NO: 24 - DNA, 3249 bp, Neisseria meningitidis
atggctgccttcaaacctaattcaatcaactacatcctcggcctcgatatcggcatcgcatccgtcggctgggcgatggtagaaattgacgaagaagaaaaccccatccgcctgattgatttgggcgtgcgcgtatttgagcgtgccgaagtaccgaaaacaggcgactcccttgccatggcaaggcgtttggcgcgcagtgttcgccgcctgacccgccgtcgcgcccaccgcctgcttcggacccgccgcctattgaaacgcgaaggcgtattacaagccgccaattttgacgaaaacggcttgattaaatccttaccgaatacaccatggcaacttcgcgcagccgcattagaccgcaaactgacgcctttagagtggtcggcagtcttgttgcatttaatcaaacatcgcggctatttatcgcaacggaaaaacgagggcgaaactgccgataaggagcttggcgctttgcttaaaggcgtagccggcaatgcccatgccttacagacaggcgatttccgcacaccggccgaattggctttaaataaatttgagaaagaaagcggccatatccgcaatcagcgcagcgattattcgcatacgttcagccgcaaagatttacaggcggagctgattttgctgtttgaaaaacaaaaagaatttggcaatccgcatgtttcaggcggccttaaagaaggtattgaaaccctactgatgacgcaacgccctgccctgtccggcgatgccgttcaaaaaatgttggggcattgcaccttcgaaccggcagagccgaaagccgctaaaaacacctacacagccgaacgtttcatctggctgaccaagctgaacaacctgcgtattttagagcaaggcagcgagcggccattgaccgataccgaacgcgccacgcttatggacgagccatacagaaaatccaaactgacttacgcacaagcccgtaagctgctgggtttagaagataccgcctttttcaaaggcttgcgctatggtaaagacaatgccgaagcctcaacattgatggaaatgaaggcctaccatgccatcagccgtgcactggaaaaagaaggattgaaagacaaaaaatccccattaaacctttctcccgaattacaagacgaaatcggcacggcattctccctgttcaaaaccgatgaagacattacaggccgtctgaaagaccgtatacagcccgaaatcttagaagcgctgttgaaacacatcagcttcgataagttcgtccaaatttccttgaaagcattgcgccgaattgtgcctctaatggaacaaggcaaacgttacgatgaagcctgcgccgaaatctacggagaccattacggcaagaagaatacggaagaaaagatttatctgccgccgattcccgccgacgaaatccgcaaccccgtcgtcttgcgcgccttatctcaagcacgtaaggtcattaacggcgtggtacgccgttacggctccccagctcgtatccatattgaaactgcaagggaagtaggtaaatcgtttaaagaccgcaaagaaattgagaaacgccaagaagaaaaccgcaaagaccgggaaaaagccgccgccaaattccgagagtatttccccaattttgtcggagaacccaaatccaaagatattctgaaactgcgcctgtacgagcaacaacacggcaaatgcctgtattcgggcaaagaaatcaacttaggccgtctgaacgaaaaaggctatgtcgaaatcgaccatgccctgccgttctcgcgcacatgggacgacagtttcaacaataaagtactggtattgggcagcgaaaaccaaaacaaaggcaatcaaaccccttacgaatacttcaacggcaaagacaacagccgcgaatggcaggaatttaaagcgcgtgtcgaaaccagccgtttcccgcgcagtaaaaaacaacggattctgctgcaaaaattcgatgaagacggctttaaagaacgcaatctgaacgacacgcgctacgtcaaccgtttcctgtgtcaatttgttgccgaccgtatgcggctgacaggtaaaggcaagaaacgtgtctttgcatccaacggacaaattaccaatctgttgcgcggcttttggggattgcgcaaagtgcgtgcggaaaacgaccgccatcacgccttggacgccgtcgtcgttgcctgctcgaccgttgccatgcagcagaaaattacccgttttgtacgctataaagagatgaacgcgtttgacggtaaaaccatagacaaagaaacaggagaagtgctgcatcaaaaaacacacttcccacaaccttgggaatttttcgcacaagaagtcatgattcgcgtcttcggcaaaccggacggcaaacccgaattcgaagaagccgataccctagaaaaactgcgcacgttgcttgccgaaaaattatcatctcgccccgaagccgtacacgaatacgttacgccactgtttgtttcacgcgcgcccaatcggaagatgagcgggcaagggcatatggagaccgtcaaatccgccaaacgactggacgaaggcgtcagcgtgttgcgcgtaccgctgacacagttaaaactgaaagacttggaaaaaatggtcaatcgggagcgcgaacctaagctatacgaagcactgaaagcacggctggaagcacataaagacgatcctgccaaagcctttgccgagccgttttacaaatacgataaagcaggcaaccgcacccaacaggtaaaagccgtacgcgtagagcaagtacagaaaaccggcgtatgggtgcgcaaccataacggtattgccgacaacgcaaccatggtgcgcgtagatgtgtttgagaaaggcgacaagtattatctggtaccgatttacagttggcaggtagcgaaagggattttgccggatagggctgttgtacaaggaaaagatgaagaagattggcaacttattgatgatagtttcaactttaaattctcattacaccctaatgatttagtcgaggttataacaaaaaaagctagaatgtttggttactttgccagctgccatcgaggcacaggtaatatcaatatacgcattcatgatcttgatcataaaattggcaaaaatggaatactggaaggtatcggcgtcaaaaccgccctttcattccaaaaataccaaattgacgaactgggcaaagaaatcagaccatgccgtctgaaaaaacgcccgcctgtccgttaa

SEQ ID NO: 25 - DNA, 4188 bp, Treponema denticola
atgaaaaaggaaattaaggattattttctcggattggatgtaggaaccggatcggttggttgggcagttactgatactgactataaactcttaaaggctaatcgtaaagacctttggggaatgaggtgttttgagacggcggaaactgcggaagtgagaaggcttcacaggggggctaggcgccgtattgagagaagaaaaaaaagaataaagctgcttcaagagcttttttcccaagaaattgcaaaaacagatgagggatttttccaaagaatgaaggaaagccctttctatgcagaagacaagactatattacaggaaaacactctttttaatgataaagattttgccgataagacctaccataaagcctatcctaccataaaccatctgataaaggcttggattgaaaacaaggtaaagccggatccaaggttattatacttagcctgtcataatattataaaaaaaagaggtcattttttattcgagggcgatttcgattcagaaaatcagtttgatacttctatacaagccctttttgaatatctgcgtgaagatatggaagtcgatattgatgccgatagccaaaaagtaaaagagattttaaaggatagctctttaaaaaattccgaaaaacaaagccgcctaaataagattttaggactgaaaccctccgacaaacaaaaaaaagctattactaatttaatatcaggcaacaaaataaactttgccgatctttatgataatccggatttaaaggatgcggagaaaaatagtatatctttttcgaaagatgattttgatgctttgagtgatgatcttgcttccattctaggagattcttttgagcttttattaaaagcaaaggctgtatataactgctcggttctttccaaggtaataggcgatgaacagtatctttcttttgcaaaggtaaaaatatatgaaaagcataaaaccgatttgactaaattaaaaaatgttataaaaaagcatttcccaaaagattataaaaaagtattcggatacaataaaaacgaaaaaaataacaacaattactccggatatgtaggcgtatgtaaaaccaagagtaaaaaactaattataaacaattctgtaaatcaagaagatttttacaaatttttaaaaactatcctttcagcaaaatccgagataaaggaagtaaatgatatattgaccgaaattgaaacagggacttttttacctaaacagatatctaaaagcaatgcggagattccttatcaattacgcaagatggagctggaaaaaatattatcaaacgcagaaaaacatttttcctttttaaaacaaaaagatgaaaaaggtttatctcacagtgaaaagattataatgcttttaacatttaagattccttattatattggacctataaacgataaccataaaaaattttttcccgatagatgctgggtagtaaaaaaagaaaaatcgccttccggtaaaactactccatggaacttttttgatcatatcgataaagaaaaaacagctgaagcatttattacaagcagaaccaatttttgcacatatttagtaggggaatccgttttaccaaaaagttctcttttatattccgagtataccgttttaaatgaaatcaacaatttacagattatcattgacggaaaaaatatctgcgatattaaactaaaacaaaaaatatacgaagatttatttaaaaaatataaaaagattacacaaaaacaaatttcaacttttatcaaacacgaaggtatttgcaataaaactgatgaagtaattattctaggtatcgataaagaatgtacatcttcgttaaaatcatatatagaacttaaaaacatattcggaaagcaagtagatgaaatttctacaaagaatatgcttgaagaaattatacgatgggctactatctatgatgaaggagaaggcaaaacaatacttaaaacaaaaataaaagccgaatatggaaaatattgttctgatgaacagatcaaaaaaattctaaatcttaaattttcaggttggggccgcttgtcacgcaaattccttgaaaccgtcacatcagaaatgccgggttttagcgaaccggtaaatataataactgcaatgcgggaaactcaaaataatttaatggagttgcttagcagtgaatttacatttactgaaaatattaaaaagataaattcgggatttgaagatgctgaaaagcaattttcatatgacggtttggttaagcctctgtttttatcaccatcggtaaaaaaaatgttgtggcagactctaaagcttgtaaaagaaatatcgcatattacccaagcccctcctaaaaaaatatttatagaaatggcaaagggtgcagagcttgaacctgcgaggactaagacaagattaaaaattttacaagacttatacaataactgtaaaaatgatgcggatgcttttagttccgagataaaagacctttcaggtaaaatagaaaatgaagataatttaaggcttcgaagcgacaaactttatctttattacacgcagcttggaaagtgcatgtattgcggtaaaccgattgaaataggccatgtatttgatacaagcaactatgatatagatcatatttatccccaatccaagattaaagatgacagtataagtaatcgggttttagtatgcagcagctgcaataaaaataaggaagataaatatcctttgaagtctgaaattcaatcaaagcaaaggggcttttggaattttttacaacgaaataactttataagccttgaaaaattgaataggttaacaagggccactccaatctcggatgacgaaacggcaaaattcattgccagacagcttgtagaaacaagacaggcgacaaaagtagctgcaaaagtattagaaaaaatgtttcccgaaactaagattgtttattctaaagctgaaaccgtatcaatgtttagaaataaattcgatattgtaaaatgcagagaaataaacgattttcatcatgctcatgatgcatatttaaatattgttgtcggaaatgtatataatacaaaatttacaaataatccttggaactttataaaggagaaacgggataatccaaagattgccgatacttacaattattataaagtttttgattatgatgtaaaaagaaataatattacggcatgggaaaaaggaaaaacaattatcactgtgaaggatatgcttaaaagaaatacccctatttatacacgccaagccgcctgcaaaaaaggagaactctttaaccaaaccattatgaaaaaaggattgggccagcatcctctaaaaaaagaaggtcctttttctaatatttcaaaatatgggggctataataaagtctctgctgcatattatactcttatagaatacgaagaaaaagggaataaaatacgaagcttagaaaccatccctctatatttggtaaaagacattcaaaaagatcaagatgtattaaagagttacttaacagatctgctagggaaaaaagaatttaagattttggttcctaaaataaaaatcaactccctcttaaaaattaacggtttcccttgtcatataacagggaaaaccaatgattctttcttactgcgtccggctgttcagttttgctgttcaaataatgaagttctttattttaaaaaaattataagattcagtgaaataagaagtcaaagagaaaagataggaaaaacaatttctccttatgaagacttatcctttagatcttatatcaaagaaaatttatggaaaaagacaaaaaatgatgaaataggagaaaaggagttttatgaccttcttcaaaagaagaatttggaaatctatgatatgcttttaacaaaacataaggatactatttataaaaaaagacctaactctgcaactattgatatcttagtcaaaggaaaagaaaagtttaaatctttaataatcgaaaatcagtttgaagttattttagagattttaaaactgttttctgccactagaaatgtatcagacttacaacatataggcggaagcaaatattcaggagttgcaaagataggaaataaaatatctagtcttgataactgtattttaatttaccaatcaataacaggtatttttgaaaaaaggattgatttgttaaaggtatga

SEQ ID NO: 26 - DNA, 4188 bp, Treponema denticola
atgaagaaggagatcaaggactacttcctgggcctggacgtgggcaccggcagcgtgggctgggccgtgaccgacaccgactacaagctgctgaaggccaaccgcaaggacctgtggggcatgcgctgcttcgagactgctgagaccgccgaggtgcgccggctgcaccgcggtgctcgccggcgcatcgagcgccgcaagaagcgcatcaagctgctgcaggagctgttcagccaggagatcgccaagaccgacgagggcttcttccagcgcatgaaggagagccccttctacgccgaggacaagaccatcctgcaggagaacaccctgttcaacgacaaggacttcgccgacaagacctaccacaaggcctaccccaccatcaaccacctgatcaaggcctggatcgagaacaaggtgaagcccgaccctcgcctgctgtacctggcctgccacaacatcatcaagaagcgcggccacttcctgttcgagggcgacttcgacagcgagaaccagttcgacaccagcatccaggccctgttcgagtacctgcgcgaggacatggaggtggacatcgacgccgacagccagaaggtgaaggagatcctgaaggacagcagcctgaagaacagcgagaagcagagccgcctgaacaagatcctgggcctgaagcccagcgacaagcagaagaaggccatcaccaacctgatcagcggcaacaagatcaacttcgccgacctgtacgacaaccccgacctgaaggacgccgagaagaacagcatcagcttcagcaaggacgacttcgacgccctgagcgacgacctggccagcatcctgggcgacagcttcgagctgctgctgaaggccaaggccgtgtacaactgcagcgtgctgagcaaggtgatcggcgacgagcagtacctgagcttcgccaaggtgaagatctacgagaagcacaagaccgaccttaccaagctgaagaacgtgatcaagaagcacttccccaaggactacaagaaggtgttcggctacaacaagaacgagaagaacaacaacaactacagcggctacgtgggcgtgtgcaagaccaagagcaagaagctgatcatcaacaacagcgtgaaccaggaggacttctacaagttcctgaagaccatcctgagcgccaagagcgagatcaaggaggtgaacgacatcctgaccgagatcgagaccggcaccttcctgcccaagcagatcagcaagagcaacgccgagatcccctaccagctgcgcaagatggagctggagaagatcctgagcaacgccgagaagcacttcagcttcctgaagcagaaggacgagaagggcctgagccacagcgagaagatcatcatgctgctgaccttcaagatcccctactacatcggccccatcaacgacaaccacaagaagttcttccccgaccgctgctgggtggtgaagaaggagaagagccccagcggcaagaccaccccctggaacttcttcgaccacatcgacaaggagaagaccgccgaggccttcatcaccagccgcaccaacttctgcacatacctggtgggcgagagcgtgctgcccaagagcagcctgctgtacagcgagtacaccgtgctgaacgagatcaacaacctgcagatcatcatcgacggcaagaacatctgcgacatcaagctgaagcagaagatctacgaggacctgttcaagaagtacaagaagatcacccagaagcagatcagcaccttcatcaagcacgagggcatctgcaacaagaccgacgaggtgatcatcctgggcatcgacaaggagtgcaccagcagcctgaagagctacatcgagctgaagaacatcttcggcaagcaggtggacgagatcagcaccaagaacatgctggaggagatcatccgctgggccaccatctacgacgagggcgagggcaagaccatcctgaagaccaagatcaaggccgagtacggcaagtactgcagcgacgagcagatcaagaagatcctgaacctgaagttcagcggctggggccgcctgagccgcaagttcctggagaccgtgaccagcgagatgcccggcttcagcgagcccgtgaacatcatcaccgccatgcgcgagacccagaacaacctgatggagctgctgagcagcgagttcaccttcaccgagaacatcaagaagatcaacagcggcttcgaggacgccgagaagcagttcagctacgacggcctggtgaagcccctgttcctgagccccagcgtgaagaagatgctgtggcagaccctgaagctggtgaaggagatcagccacatcacccaggctcctcctaagaagatcttcatcgagatggccaagggcgccgagctggagcctgctcgcaccaagacccgcctgaagatcctgcaggacctgtacaacaactgcaagaacgacgccgacgcattcagcagcgagatcaaggacctgagcggcaagatcgagaacgaggacaacctgcgcctgcgcagcgacaagctgtacctgtactacacccagctgggcaagtgcatgtactgcggcaagcccatcgagatcggccacgtgttcgacaccagcaactacgacatcgaccacatctacccccagagcaagatcaaggacgacagcatcagcaaccgcgtgctggtgtgcagcagctgcaacaagaacaaggaggacaagtaccctctgaagagcgagatccagagcaagcagcgcggcttctggaacttcctgcagcgcaacaacttcatcagcctggagaagctgaaccgcctgacccgcgccacccccatcagcgacgacgagaccgccaagttcatcgcccgccagctggtggagactcgccaagctaccaaggtggccgccaaggtgctggagaagatgttccccgagaccaagatcgtgtacagcaaggccgagaccgtgagcatgttccgcaacaagttcgacatcgtgaagtgccgcgagatcaacgacttccaccacgcccacgacgcctacctgaacatcgtggtgggcaacgtgtacaacaccaagttcaccaacaacccctggaatttcattaaggagaagcgcgacaaccccaagatcgccgacacctacaactactacaaggtgttcgactacgacgtgaagcgcaacaacatcaccgcctgggagaagggcaagaccatcatcaccgtgaaggacatgctgaagcgcaacacccccatctacacccgccaggccgcctgcaagaagggcgagctgttcaaccagaccatcatgaagaagggcctgggccagcaccccctgaagaaggagggccccttcagcaacatcagcaagtacggcggctacaacaaggtgagcgccgcctactacaccctgatcgagtacgaggagaagggcaacaagatccgcagcctggagaccatccccctgtacctggtgaaggacatccagaaggaccaggacgtgctgaagagctacctgaccgacctgctgggcaagaaggagttcaagatcctggtgcccaagatcaagatcaacagcctgctgaagatcaacggcttcccctgccacatcaccggcaagaccaacgacagcttcctgctgcgccccgccgtgcagttctgctgcagcaacaacgaggtgctgtacttcaagaagatcatccgcttcagcgagatccgcagccagcgcgagaagatcggcaagaccatcagcccctacgaggacctgagcttccgcagctacatcaaggagaacctgtggaagaagaccaagaacgacgagatcggcgagaaggagttctacgacctgctgcagaagaagaacctggagatctacgacatgctgctgaccaagcacaaggacaccatctacaagaagcgccccaacagcgccaccatcgacatcctggtgaagggcaaggagaagttcaagagcctgatcatcgagaaccagttcgaggtgatcctggagatcctgaagctgttcagcgccacccgcaacgtgagcgacctgcagcacatcggcggcagcaagtacagcggcgtggccaagatcggcaacaagatcagcagcctggacaactgcatcctgatctaccagagcatcaccggcatcttcgagaagcgcatcgacctgctgaaggtgtaa

SEQ ID NO: 27 - DNA, 4188 bp, Treponema denticola
atgaagaaggagatcaaggactacttcctgggcctggccgtgggcaccggcagcgtgggctgggccgtgaccgacaccgactacaagctgctgaaggccaaccgcaaggacctgtggggcatgcgctgcttcgagactgctgagaccgccgaggtgcgccggctgcaccgcggtgctcgccggcgcatcgagcgccgcaagaagcgcatcaagctgctgcaggagctgttcagccaggagatcgccaagaccgacgagggcttcttccagcgcatgaaggagagccccttctacgccgaggacaagaccatcctgcaggagaacaccctgttcaacgacaaggacttcgccgacaagacctaccacaaggcctaccccaccatcaaccacctgatcaaggcctggatcgagaacaaggtgaagcccgaccctcgcctgctgtacctggcctgccacaacatcatcaagaagcgcggccacttcctgttcgagggcgacttcgacagcgagaaccagttcgacaccagcatccaggccctgttcgagtacctgcgcgaggacatggaggtggacatcgacgccgacagccagaaggtgaaggagatcctgaaggacagcagcctgaagaacagcgagaagcagagccgcctgaacaagatcctgggcctgaagcccagcgacaagcagaagaaggccatcaccaacctgatcagcggcaacaagatcaacttcgccgacctgtacgacaaccccgacctgaaggacgccgagaagaacagcatcagcttcagcaaggacgacttcgacgccctgagcgacgacctggccagcatcctgggcgacagcttcgagctgctgctgaaggccaaggccgtgtacaactgcagcgtgctgagcaaggtgatcggcgacgagcagtacctgagcttcgccaaggtgaagatctacgagaagcacaagaccgaccttaccaagctgaagaacgtgatcaagaagcacttccccaaggactacaagaaggtgttcggctacaacaagaacgagaagaacaacaacaactacagcggctacgtgggcgtgtgcaagaccaagagcaagaagctgatcatcaacaacagcgtgaaccaggaggacttctacaagttcctgaagaccatcctgagcgccaagagcgagatcaaggaggtgaacgacatcctgaccgagatcgagaccggcaccttcctgcccaagcagatcagcaagagcaacgccgagatcccctaccagctgcgcaagatggagctggagaagatcctgagcaacgccgagaagcacttcagcttcctgaagcagaaggacgagaagggcctgagccacagcgagaagatcatcatgctgctgaccttcaagatcccctactacatcggccccatcaacgacaaccacaagaagttcttccccgaccgctgctgggtggtgaagaaggagaagagccccagcggcaagaccaccccctggaacttcttcgaccacatcgacaaggagaagaccgccgaggccttcatcaccagccgcaccaacttctgcacatacctggtgggcgagagcgtgctgcccaagagcagcctgctgtacagcgagtacaccgtgctgaacgagatcaacaacctgcagatcatcatcgacggcaagaacatctgcgacatcaagctgaagcagaagatctacgaggacctgttcaagaagtacaagaagatcacccagaagcagatcagcaccttcatcaagcacgagggcatctgcaacaagaccgacgaggtgatcatcctgggcatcgacaaggagtgcaccagcagcctgaagagctacatcgagctgaagaacatcttcggcaagcaggtggacgagatcagcaccaagaacatgctggaggagatcatccgctgggccaccatctacgacgagggcgagggcaagaccatcctgaagaccaagatcaaggccgagtacggcaagtactgcagcgacgagcagatcaagaagatcctgaacctgaagttcagcggctggggccgcctgagccgcaagttcctggagaccgtgaccagcgagatgcccggcttcagcgagcccgtgaacatcatcaccgccatgcgcgagacccagaacaacctgatggagctgctgagcagcgagttcaccttcaccgagaacatcaagaagatcaacagcggcttcgaggacgccgagaagcagttcagctacgacggcctggtgaagcccctgttcctgagccccagcgtgaagaagatgctgtggcagaccctgaagctggtgaaggagatcagccacatcacccaggctcctcctaagaagatcttcatcgagatggccaagggcgccgagctggagcctgctcgcaccaagacccgcctgaagatcctgcaggacctgtacaacaactgcaagaacgacgccgacgcattcagcagcgagatcaaggacctgagcggcaagatcgagaacgaggacaacctgcgcctgcgcagcgacaagctgtacctgtactacacccagctgggcaagtgcatgtactgcggcaagcccatcgagatcggccacgtgttcgacaccagcaactacgacatcgctgctatctacccccagagcaagatcaaggacgacagcatcagcaaccgcgtgctggtgtgcagcagctgcgccaagaacaaggaggacaagtaccctctgaagagcgagatccagagcaagcagcgcggcttctggaacttcctgcagcgcaacaacttcatcagcctggagaagctgaaccgcctgacccgcgccacccccatcagcgacgacgagaccgccaagttcatcgcccgccagctggtggagactcgccaagctaccaaggtggccgccaaggtgctggagaagatgttccccgagaccaagatcgtgtacagcaaggccgagaccgtgagcatgttccgcaacaagttcgacatcgtgaagtgccgcgagatcaacgacttccaccacgcccacgacgcctacctgaacatcgtggtgggcaacgtgtacaacaccaagttcaccaacaacccctggaatttcattaaggagaagcgcgacaaccccaagatcgccgacacctacaactactacaaggtgttcgactacgacgtgaagcgcaacaacatcaccgcctgggagaagggcaagaccatcatcaccgtgaaggacatgctgaagcgcaacacccccatctacacccgccaggccgcctgcaagaagggcgagctgttcaaccagaccatcatgaagaagggcctgggccagcaccccctgaagaaggagggccccttcagcaacatcagcaagtacggcggctacaacaaggtgagcgccgcctactacaccctgatcgagtacgaggagaagggcaacaagatccgcagcctggagaccatccccctgtacctggtgaaggacatccagaaggaccaggacgtgctgaagagctacctgaccgacctgctgggcaagaaggagttcaagatcctggtgcccaagatcaagatcaacagcctgctgaagatcaacggcttcccctgccacatcaccggcaagaccaacgacagcttcctgctgcgccccgccgtgcagttctgctgcagcaacaacgaggtgctgtacttcaagaagatcatccgcttcagcgagatccgcagccagcgcgagaagatcggcaagaccatcagcccctacgaggacctgagcttccgcagctacatcaaggagaacctgtggaagaagaccaagaacgacgagatcggcgagaaggagttctacgacctgctgcagaagaagaacctggagatctacgacatgctgctgaccaagcacaaggacaccatctacaagaagcgccccaacagcgccaccatcgacatcctggtgaagggcaaggagaagttcaagagcctgatcatcgagaaccagttcgaggtgatcctggagatcctgaagctgttcagcgccacccgcaacgtgagcgacctgcagcacatcggcggcagcaagtacagcggcgtggccaagatcggcaacaagatcagcagcctggacaactgcatcctgatctaccagagcatcaccggcatcttcgagaagcgcatcgacctgctgaaggtgtaa

SEQ ID NO: 28 - protein, 1053 aa, Streptococcus aureas
MKRNYILGLDIGITSVGYGIIDYETRDVIDAGVRLFKEANVENNEGRRSKRGARRLKRRRRHRIQRVKKLLFDYNLLTDHSELSGINPYEARVKGLSQKLSEEEFSAALLHLAKRRGVHNVNEVEEDTGNELSTKEQISRNSKALEEKYVAELQLERLKKDGEVRGSINRFKTSDYVKEAKQLLKVQKAYHQLDQSFIDTYIDLLETRRTYYEGPGEGSPFGWKDIKEWYEMLMGHCTYFPEELRSVKYAYNADLYNALNDLNNLVITRDENEKLEYYEKFQIIENVFKQKKKPTLKQIAKEILVNEEDIKGYRVTSTGKPEFTNLKVYHDIKDITARKEIIENAELLDQIAKILTIYQSSEDIQEELTNLNSELTQEEIEQISNLKGYTGTHNLSLKAINLILDELWHTNDNQIAIFNRLKLVPKKVDLSQQKEIPTTLVDDFILSPVVKRSFIQSIKVINAIIKKYGLPNDIIIELAREKNSKDAQKMINEMQKRNRQTNERIEEIIRTTGKENAKYLIEKIKLHDMQEGKCLYSLEAIPLEDLLNNPFNYEVDHIIPRSVSFDNSFNNKVLVKQEENSKKGNRTPFQYLSSSDSKISYETFKKHILNLAKGKGRISKTKKEYLLEERDINRFSVQKDFINRNLVDTRYATRGLMNLLRSYFRVNNLDVKVKSINGGFTSFLRRKWKFKKERNKGYKHHAEDALIIANADFIFKEWKKLDKAKKVMENQMFEEKQAESMPEIETEQEYKEIFITPHQIKHIKDFKDYKYSHRVDKKPNRELINDTLYSTRKDDKGNTLIVNNLNGLYDKDNDKLKKLINKSPEKLLMYHHDPQTYQKLKLIMEQYGDEKNPLYKYYEETGNYLTKYSKKDNGPVIKKIKYYGNKLNAHLDITDDYPNSRNKVVKLSLKPYRFDVYLDNGVYKFVTVKNLDVIKKENYYEVNSKCYEEAKKLKKISNQAEFIASFYNNDLIKINGELYRVIGVNNDLLNRIEVNMIDITYREYLENMNDKRPPRIIKTIASKTQSIKKYSTDILGNLYEVKSKKHPQIIKKG

SEQ ID NO: 29 - DNA, 3162 bp, Streptococcus aureas
atgaaaaggaattatatcttaggattagatatcggaattacatcagtgggttatggaattattgattatgaaactagagatgtcatagatgcgggcgtacgtttatttaaagaggctaatgttgaaaataatgaaggacgacgatcaaaaagaggtgccagaaggcttaagaggcgtcgtagacatagaatacaaagagtaaagaaacttttatttgattacaatttgttgacagatcatagtgagctaagtggaatcaatccttacgaggcgcgcgtaaagggattaagtcaaaaattaagtgaagaggaattttctgcggcattgctacatttagcaaagcgtagaggtgtacataatgttaatgaagtggaagaagatacaggtaatgaattatccactaaagaacaaatttcaagaaatagtaaagcgttagaagagaagtatgttgcagaattacagttggaacgtttgaaaaaagacggtgaagtgagaggttcgattaaccgtttcaaaacatctgactatgtaaaagaagcaaagcagttattaaaagtacaaaaagcatatcatcaacttgatcaatcatttatagacacttatattgatttattggaaacaagaagaacatattatgagggaccaggtgaaggtagcccatttggatggaaagatattaaagaatggtatgaaatgttaatgggacattgtacgtatttcccagaagaattacgtagtgtgaaatatgcctataatgctgatttatataatgcgctgaatgatttgaacaacttggttattacacgagatgagaatgagaagctagagtattatgaaaaattccaaattatcgagaatgtctttaaacaaaagaaaaagccgacgcttaaacaaattgcgaaggaaatcttggtgaatgaagaagacatcaaaggctatcgtgtcacaagtacaggtaaaccagaatttacaaacttgaaagtttatcacgatatcaaagatattacagcaagaaaagaaattatcgagaatgcagagctactcgatcaaatagctaaaatattaactatttaccagtcatcagaagatatacaagaagaattaacaaacctaaattcagaattgacacaagaagagattgaacaaatttcaaacttgaaaggttatacaggaactcataacctttcactaaaggcaataaatttaatattagacgaattgtggcatacgaacgataatcaaatagctattttcaatcgtttgaaacttgtacctaaaaaggtagatttaagccaacaaaaagaaattcctactactttagttgatgattttatactgtctccagtagtgaaacgttcatttatacaatctattaaagttattaacgctattattaaaaaatacggtttgccaaatgatattattattgaacttgcgagagaaaagaattctaaagatgcacaaaaaatgattaatgaaatgcagaagagaaatcgtcaaacgaatgaacgtattgaggaaattataagaacgacaggtaaagaaaatgctaaatatttaattgaaaaaattaagctgcacgatatgcaagaagggaaatgtttatactcgttagaagcaatccctctagaagatttacttaataatccattcaattacgaagtagaccatatcattccacgttctgtttctttcgataactctttcaataataaagtgttggtgaaacaagaagaaaatagtaaaaaaggtaatagaacgccatttcaatatttaagttcttcagattctaaaataagttatgagacattcaaaaagcatattttaaatcttgctaaaggcaaaggtagaatctctaagacgaaaaaagaatatttgttagaagaacgagatatcaatcgcttcagtgtccaaaaagattttattaaccgtaacttagtagatacacgctatgcgacaagagggttaatgaacttattaagatcttattttagagtgaataacttagatgtcaaagtgaaatcgattaatggcggattcacaagtttcttaagaaggaaatggaagttcaaaaaagaaagaaataagggctacaaacaccatgctgaagatgcactgattattgcgaacgctgattttattttcaaagaatggaaaaaactagataaagctaaaaaagtgatggaaaatcaaatgtttgaagaaaagcaagctgaaagtatgcctgaaattgagactgagcaagagtataaagaaatttttataacgcctcatcaaattaaacatattaaggattttaaagattataaatattcacatagagttgataaaaagccgaatagagagttaataaatgatacattatattctacgagaaaagatgacaagggtaatacattaatcgttaataacttaaatggtttatacgataaagataatgataaattgaaaaaattaattaataaatcacctgaaaaattattgatgtatcatcatgatccacaaacatatcaaaaattaaaattgatcatggaacaatatggcgatgagaaaaatccgctttataaatattatgaagaaacaggcaattacttaacaaaatatagtaaaaaagataacggaccagtcatcaaaaaaattaaatattatggtaacaagctaaatgcgcatttagatattacggatgattatccaaatagcagaaataaagtagtaaaactttcattaaaaccatatcgctttgatgtttatttagataatggggtatataaatttgtgacagttaaaaatttagatgttatcaaaaaagaaaactactatgaagttaattcaaagtgttatgaagaagcaaaaaaactgaagaaaattagtaatcaagcagaatttatcgcaagtttttacaataatgacttgattaagattaacggagaattatatagagtcataggtgtaaataatgatctacttaacagaattgaagtaaatatgatagacatcacatatagagaatatttagagaacatgaatgataaaagaccacctagaataattaaaacaatagcaagcaaaacacaatctattaaaaagtattctacagatattctaggcaatctttatgaagtgaagagtaaaaagcatcctcaaatcataaagaaaggatga

SEQ ID NO: 30 - protein, 1629 aa, Francisella tularensis
MNFKILPIAIDLGVKNTGVFSAFYQKGTSLERLDNKNGKVYELSKDSYTLLMNNRTARRHQRRGIDRKQLVKRLFKLIWTEQLNLEWDKDTQQAISFLFNRRGFSFITDGYSPEYLNIVPEQVKAILMDIFDDYNGEDDLDSYLKLATEQESKISEIYNKLMQKILEFKLMKLCTDIKDDKVSTKTLKEITSYEFELLADYLANYSESLKTQKFSYTDKQGNLKELSYYHHDKYNIQEFLKRHATINDRILDTLLTDDLDIWNFNFEKFDFDKNEEKLQNQEDKDHIQAHLHHFVFAVNKIKSEMASGGRHRSQYFQEITNVLDENNHQEGYLKNFCENLHNKKYSNLSVKNLVNLIGNLSNLELKPLRKYFNDKIHAKADHWDEQKFTETYCHWILGEWRVGVKDQDKKDGAKYSYKDLCNELKQKVTKAGLVDFLLELDPCRTIPPYLDNNNRKPPKCQSLILNPKFLDNQYPNWQQYLQELKKLQSIQNYLDSFETDLKVLKSSKDQPYFVEYKSSNQQIASGQRDYKDLDARILQFIFDRVKASDELLLNEIYFQAKKLKQKASSELEKLESSKKLDEVIANSQLSQILKSQHTNGIFEQGTFLHLVCKYYKQRQRARDSRLYIMPEYRYDKKLHKYNNTGRFDDDNQLLTYCNHKPRQKRYQLLNDLAGVLQVSPNFLKDKIGSDDDLFISKWLVEHIRGFKKACEDSLKIQKDNRGLLNHKINIARNTKGKCEKEIFNLICKIEGSEDKKGNYKHGLAYELGVLLFGEPNEASKPEFDRKIKKFNSIYSFAQIQQIAFAERKGNANTCAVCSADNAHRMQQIKITEPVEDNKDKIILSAKAQRLPAIPTRIVDGAVKKMATILAKNIVDDNWQNIKQVLSAKHQLHIPIITESNAFEFEPALADVKGKSLKDRRKKALERISPENIFKDKNNRIKEFAKGISAYSGANLTDGDFDGAKEELDHIIPRSHKKYGTLNDEANLICVTRGDNKNKGNRIFCLRDLADNYKLKQFETTDDLEIEKKIADTIWDANKKDFKFGNYRSFINLTPQEQKAFRHALFLADENPIKQAVIRAINNRNRTFVNGTQRYFAEVLANNIYLRAKKENLNTDKISFDYFGIPTIGNGRGIAEIRQLYEKVDSDIQAYAKGDKPQASYSHLIDAMLAFCIAADEHRNDGSIGLEIDKNYSLYPLDKNTGEVFTKDIFSQIKITDNEFSDKKLVRKKAIEGFNTHRQMTRDGIYAENYLPILIHKELNEVRKGYTWKNSEEIKIFKGKKYDIQQLNNLVYCLKFVDKPISIDIQISTLEELRNILTTNNIAATAEYYYINLKTQKLHEYYIENYNTALGYKKYSKEMEFLRSLAYRSERVKIKSIDDVKQVLDKDSNFIIGKITLPFKKEWQRLYREWQNTTIKDDYEFLKSFFNVKSITKLHKKVRKDFSLPISTNEGKFLVKRKTWDNNFIYQILNDSDSRADGTKPFIPAFDISKNEIVEAIIDSFTSKNIFWLPKNIELQKVDNKNIFAIDTSKWFEVETPSDLRDIGIATIQYKIDNNSRPKVRVKLDYVIDDDSKINYFMNHSLLKSRYPDKVLEILKQSTIIEFESSGFNKTIKEMLGMKLAGIYNETSNN

SEQ ID NO: 31 - DNA, 4890 bp, Francisella tularensis
atgaatttcaaaatattgccaatagcaatagatttaggtgttaaaaatactggtgtctttagcgcattttatcaaaaaggaacttctcttgagagattggataataaaaatggcaaagtatatgaactatcaaaagattcttatactttattgatgaataatagaacagcaagaagacatcaaagaagagggatagatagaaagcagctagtcaaaaggctctttaagcttatttggacagagcagctaaatttagagtgggataaagacactcaacaagcaattagctttttatttaatcgtagaggttttagttttattactgatggttattcgcctgaatatttaaatattgttccagagcaagtaaaagcgatacttatggatatatttgatgattacaacggtgaagatgatttagacagttatttaaaattagctactgagcaagaaagcaaaatttctgaaatttataacaagctaatgcaaaaaatattagagtttaaattaatgaaattatgtactgatattaaggatgataaagtaagtactaaaacgcttaaagaaatcacaagctatgaatttgagttattagctgattatttagcaaactatagcgagagtttaaaaacacaaaaatttagttatacagataaacaaggtaatttaaaagagctaagctactatcatcatgataaatataatattcaagaatttctaaagcgacatgctactataaatgatcgaattttagatactcttttaactgatgatttagatatttggaattttaattttgagaaatttgattttgataagaatgaagaaaagcttcagaatcaggaagataaagatcatatacaagcgcatttacatcattttgtttttgcagtaaataaaataaaaagtgaaatggcaagtggtggtcgtcatcgtagccaatattttcaagagataacaaatgtgctagatgaaaataatcatcaagagggatatctcaagaatttctgtgaaaatttgcataataaaaaatattcaaatttaagtgttaaaaatttagttaatctaattggtaacctaagtaatttagagctaaaaccgctaagaaaatattttaatgacaaaattcacgcaaaagctgatcattgggatgagcaaaagtttacagaaacttattgccactggatattaggagagtggcgagtaggtgtcaaagatcaagataagaaagatggcgctaaatatagttataaagatctgtgtaatgaattaaaacaaaaagttactaaggctggtttggtagattttttattagagttagatccatgtagaactataccaccatatctggataacaataaccgtaaaccaccaaaatgtcaaagtttgattttaaatccgaagtttttagataatcaatatccaaactggcaacaatatttacaagaattaaagaaactacaaagtattcaaaattatttagacagttttgaaactgatttaaaagtcttaaagtcaagtaaagatcaaccatattttgttgaatacaagagttcaaatcagcaaatagcaagtggtcaaagagattataaagatttagatgctcgaatattacagtttatatttgatagggtaaaagctagtgatgagttgcttttgaatgagatttattttcaggctaaaaaacttaaacaaaaagctagctctgagttagaaaaactcgagtcgagcaaaaagctagatgaagttatagcaaatagtcaactatcacagatactaaagtctcaacatacaaatggtatttttgaacagggtacttttttgcatttggtttgtaaatattataaacaaagacaaagagcgagagactctaggctatatattatgcctgaatatcgttatgataaaaaactacataaatataacaatacaggcaggtttgatgatgataatcagctgctaacatattgtaatcataagccaagacaaaaaagataccaattgttaaatgatttagctggggtgttgcaggtatcacctaattttttgaaagataaaattggttctgatgatgatctatttattagcaaatggttggtagagcatattagaggatttaaaaaagcttgtgaagatagtttaaaaatacaaaaagacaatagaggattattaaatcataaaataaatatagctaggaatacaaaaggcaaatgtgaaaaagaaatatttaatttaatatgtaaaatagaaggttcagaagataaaaaaggtaattacaagcatggtttagcttacgaattaggagtacttttatttggtgaacctaatgaagctagtaaacctgagttcgatagaaaaattaaaaaatttaactcaatatacagttttgcacagattcaacaaattgcttttgcagagcgtaaaggcaatgctaacacttgtgcagtttgtagtgctgataatgctcatagaatgcaacaaattaagatcactgagcctgtagaggacaataaagataagataatcttaagtgccaaagctcagagactaccagcgattccaactagaatagttgacggtgcggttaagaaaatggcaactatattagctaaaaatatagttgatgataattggcagaatatcaaacaagttttatcagcaaaacatcagttacatatacctattatcacagaatcaaatgcttttgagtttgaaccagcattagctgatgtaaaaggtaagagcctaaaagataggagaaaaaaagcattagagagaataagtcctgaaaatatattcaaggataaaaacaatagaataaaagaatttgctaaaggtatatcagcatatagtggtgctaatttaactgatggcgattttgatggtgcaaaagaagaattagatcatataatacctcgttcacataaaaaatacggtactctaaatgatgaagcaaatctaatttgtgtaactcgtggtgataataaaaataaaggtaatagaattttctgcctacgtgatcttgcagataactataaactaaaacagtttgagacaactgatgatttagaaattgaaaagaagatagctgatacaatctgggatgctaacaagaaagattttaaatttggtaattatcgtagttttattaacctaacaccacaagagcagaaagcatttcgtcacgcgctatttctggctgatgaaaatcctatcaaacaagcagtcataagagcgataaataatcgtaatcgtacatttgtaaatggcactcaacgctattttgcagaagtactggcaaacaatatctatctaagggctaaaaaagaaaatctaaatacagataaaatttcatttgattattttggtattccaactataggtaatggtagaggtattgctgaaatccgtcaactttatgaaaaagttgatagtgatatacaagcttatgcaaaaggtgataaacctcaagctagctactctcacctaatagatgcgatgctggctttttgtattgctgctgatgaacacagaaatgatggaagtataggtctagaaatcgataaaaattatagtttatatccattagataaaaatacaggagaagtctttaccaaagatatttttagtcaaattaaaattactgataatgagtttagcgataaaaaattagtaagaaaaaaagctatagagggctttaacacgcatagacaaatgactagagatggcatttatgcagaaaattacctaccaatactaatccataaagaactaaatgaagttagaaaaggctatacttggaaaaatagtgaagaaataaaaatattcaaaggtaaaaagtacgatatacaacaattgaataaccttgtgtattgtctaaaatttgtagataaacctatatctatagatatacaaattagtaccttagaagagttaagaaatatattaacaacaaataatatagctgctacagcagaatactattatataaatctaaaaacccaaaaattacatgagtattatatcgaaaactataatactgccttaggttataaaaaatacagtaaagaaatggagtttttgagaagcttagcttatcgtagcgaaagggtaaaaattaaatcaatagatgatgtaaagcaggttttggataaggatagtaactttatcatcggtaagattactttaccatttaaaaaagagtggcaaagactatatcgtgagtggcaaaatacaactatcaaagatgattatgagtttttaaaatcattctttaatgttaaaagtattactaagttgcataaaaaagttagaaaagatttctctttacctatttctacaaatgaaggtaaattcctggtcaaaagaaaaacatgggataacaattttatctatcagatattaaatgattctgattctagagcagacggaacaaagccatttattccagcttttgacatttctaaaaatgaaatagtcgaagccataattgattcatttacatcaaaaaatattttttggctgcctaaaaatatagaattacaaaaggtggataataaaaacatttttgctatagatactagtaaatggttcgaagtagaaacacctagtgatcttagagacattggaatagcaacaattcaatacaagatagataataattctcgccctaaagtcagagttaaacttgattatgttatcgatgatgatagtaagataaattattttatgaatcattctttattaaaatcaagatatcctgacaaagttttagaaattttaaaacaatcaactattatagaatttgaaagttcaggttttaataaaactatcaaagaaatgcttggtatgaaattagcaggtatttataatgaaacatctaataattag

SEQ ID NO: 32 - DNA, 3903 bp, Francisella tularensis
  Francisella tularensis subsp. novicida (strain U112)
atgtcaatttatcaagaatttgttaataaatatagtttaagtaaaactctaagatttgagttaatcccacagggtaaaacacttgaaaacataaaagcaagaggtttgattttagatgatgagaaaagagctaaagactacaaaaaggctaaacaaataattgataaatatcatcagttttttatagaggagatattaagttcggtttgtattagcgaagatttattacaaaactattctgatgtttattttaaacttaaaaagagtgatgatgataatctacaaaaagattttaaaagtgcaaaagatacgataaagaaacaaatatctgaatatataaaggactcagagaaatttaagaatttgtttaatcaaaaccttatcgatgctaaaaaagggcaagagtcagatttaattctatggctaaagcaatctaaggataatggtatagaactatttaaagccaatagtgatatcacagatatagatgaggcgttagaaataatcaaatcttttaaaggttggacaacttattttaagggttttcatgaaaatagaaaaaatgtttatagtagcaatgatattcctacatctattatttataggatagtagatgataatttgcctaaatttctagaaaataaagctaagtatgagagtttaaaagacaaagctccagaagctataaactatgaacaaattaaaaaagatttggcagaagagctaacctttgatattgactacaaaacatctgaagttaatcaaagagttttttcacttgatgaagtttttgagatagcaaactttaataattatctaaatcaaagtggtattactaaatttaatactattattggtggtaaatttgtaaatggtgaaaatacaaagagaaaaggtataaatgaatatataaatctatactcacagcaaataaatgataaaacactcaaaaaatataaaatgagtgttttatttaagcaaattttaagtgatacagaatctaaatcttttgtaattgataagttagaagatgatagtgatgtagttacaacgatgcaaagtttttatgagcaaatagcagcttttaaaacagtagaagaaaaatctattaaagaaacactatctttattatttgatgatttaaaagctcaaaaacttgatttgagtaaaatttattttaaaaatgataaatctcttactgatctatcacaacaagtttttgatgattatagtgttattggtacagcggtactagaatatataactcaacaaatagcacctaaaaatcttgataaccctagtaagaaagagcaagaattaatagccaaaaaaactgaaaaagcaaaatacttatctctagaaactataaagcttgccttagaagaatttaataagcatagagatatagataaacagtgtaggtttgaagaaatacttgcaaactttgcggctattccgatgatatttgatgaaatagctcaaaacaaagacaatttggcacagatatctatcaaatatcaaaatcaaggtaaaaaagacctacttcaagctagtgcggaagatgatgttaaagctatcaaggatcttttagatcaaactaataatctcttacataaactaaaaatatttcatattagtcagtcagaagataaggcaaatattttagacaaggatgagcatttttatctagtatttgaggagtgctactttgagctagcgaatatagtgcctctttataacaaaattagaaactatataactcaaaagccatatagtgatgagaaatttaagctcaattttgagaactcgactttggctaatggttgggataaaaataaagagcctgacaatacggcaattttatttatcaaagatgataaatattatctgggtgtgatgaataagaaaaataacaaaatatttgatgataaagctatcaaagaaaataaaggcgagggttataaaaaaattgtttataaacttttacctggcgcaaataaaatgttacctaaggttttcttttctgctaaatctataaaattttataatcctagtgaagatatacttagaataagaaatcattccacacatacaaaaaatggtagtcctcaaaaaggatatgaaaaatttgagtttaatattgaagattgccgaaaatttatagatttttataaacagtctataagtaagcatccggagtggaaagattttggatttagattttctgatactcaaagatataattctatagatgaattttatagagaagttgaaaatcaaggctacaaactaacttttgaaaatatatcagagagctatattgatagcgtagttaatcagggtaaattgtacctattccaaatctataataaagatttttcagcttatagcaaagggcgaccaaatctacatactttatattggaaagcgctgtttgatgagagaaatcttcaagatgtggtttataagctaaatggtgaggcagagcttttttatcgtaaacaatcaatacctaaaaaaatcactcacccagctaaagaggcaatagctaataaaaacaaagataatcctaaaaaagagagtgtttttgaatatgatttaatcaaagataaacgctttactgaagataagtttttctttcactgtcctattacaatcaattttaaatctagtggagctaataagtttaatgatgaaatcaatttattgctaaaagaaaaagcaaatgatgttcatatattaagtatagatagaggtgaaagacatttagcttactatactttggtagatggtaaaggcaatatcatcaaacaagatactttcaacatcattggtaatgatagaatgaaaacaaactaccatgataagcttgctgcaatagagaaagatagggattcagctaggaaagactggaaaaagataaataacatcaaagagatgaaagagggctatctatctcaggtagttcatgaaatagctaagctagttatagagtataatgctattgtggtttttgaggatttaaattttggatttaaaagagggcgtttcaaggtagagaagcaggtctatcaaaagttagaaaaaatgctaattgagaaactaaactatctagttttcaaagataatgagtttgataaaactgggggagtgcttagagcttatcagctaacagcaccttttgagacttttaaaaagatgggtaaacaaacaggtattatctactatgtaccagctggttttacttcaaaaatttgtcctgtaactggttttgtaaatcagttatatcctaagtatgaaagtgtcagcaaatctcaagagttctttagtaagtttgacaagatttgttataaccttgataagggctattttgagtttagttttgattataaaaactttggtgacaaggctgccaaaggcaagtggactatagctagctttgggagtagattgattaactttagaaattcagataaaaatcataattgggatactcgagaagtttatccaactaaagagttggagaaattgctaaaagattattctatcgaatatgggcatggcgaatgtatcaaagcagctatttgcggtgagagcgacaaaaagttttttgctaagctaactagtgtcctaaatactatcttacaaatgcgtaactcaaaaacaggtactgagttagattatctaatttcaccagtagcagatgtaaatggcaatttctttgattcgcgacaggcgccaaaaaatatgcctcaagatgctgatgccaatggtgcttatcatattgggctaaaaggtctgatgctactaggtaggatcaaaaataatcaagagggcaaaaaactcaatttggttatcaaaaatgaagagtattttgagttcgtgcagaataggaataactaa

SEQ ID NO: 33 - protein, 1300 aa, Francisella tularensis
  Francisella tularensis subsp. novicida (strain U112)
MSIYQEFVNKYSLSKTLRFELIPQGKTLENIKARGLILDDEKRAKDYKKAKQIIDKYHQFFIEEILSSVCISEDLLQNYSDVYFKLKKSDDDNLQKDFKSAKDTIKKQISEYIKDSEKFKNLFNQNLIDAKKGQESDLILWLKQSKDNGIELFKANSDITDIDEALEIIKSFKGWTTYFKGFHENRKNVYSSNDIPTSIIYRIVDDNLPKFLENKAKYESLKDKAPEAINYEQIKKDLAEELTFDIDYKTSEVNQRVFSLDEVFEIANFNNYLNQSGITKFNTIIGGKFVNGENTKRKGINEYINLYSQQINDKTLKKYKMSVLFKQILSDTESKSFVIDKLEDDSDVVTTMQSFYEQIAAFKTVEEKSIKETLSLLFDDLKAQKLDLSKIYFKNDKSLTDLSQQVFDDYSVIGTAVLEYITQQIAPKNLDNPSKKEQELIAKKTEKAKYLSLETIKLALEEFNKHRDIDKQCRFEEILANFAAIPMIFDEIAQNKDNLAQISIKYQNQGKKDLLQASAEDDVKAIKDLLDQTNNLLHKLKIFHISQSEDKANILDKDEHFYLVFEECYFELANIVPLYNKIRNYITQKPYSDEKFKLNFENSTLANGWDKNKEPDNTAILFIKDDKYYLGVMNKKNNKIFDDKAIKENKGEGYKKIVYKLLPGANKMLPKVFFSAKSIKFYNPSEDILRIRNHSTHTKNGSPQKGYEKFEFNIEDCRKFIDFYKQSISKHPEWKDFGFRFSDTQRYNSIDEFYREVENQGYKLTFENISESYIDSVVNQGKLYLFQIYNKDFSAYSKGRPNLHTLYWKALFDERNLQDVVYKLNGEAELFYRKQSIPKKITHPAKEAIANKNKDNPKKESVFEYDLIKDKRFTEDKFFFHCPITINFKSSGANKFNDEINLLLKEKANDVHILSIDRGERHLAYYTLVDGKGNIIKQDTFNIIGNDRMKTNYHDKLAAIEKDRDSARKDWKKINNIKEMKEGYLSQVVHEIAKLVIEYNAIVVFEDLNFGFKRGRFKVEKQVYQKLEKMLIEKLNYLVFKDNEFDKTGGVLRAYQLTAPFETFKKMGKQTGIIYYVPAGFTSKICPVTGFVNQLYPKYESVSKSQEFFSKFDKICYNLDKGYFEFSFDYKNFGDKAAKGKWTIASFGSRLINFRNSDKNHNWDTREVYPTKELEKLLKDYSIEYGHGECIKAAICGESDKKFFAKLTSVLNTILQMRNSKTGTELDYLISPVADVNGNFFDSRQAPKNMPQDADANGAYHIGLKGLMLLGRIKNNQEGKKLNLVIKNEEYFEFVQNRNN

SEQ ID NO: 34 - DNA, 3924 bp, Acidaminococcus sp.
  Acidaminococcus sp. (strain BV3L6)
atgacccaatttgaaggttttaccaatttataccaagtttcgaagacccttcgttttgaactgattccccaaggaaaaacactcaaacatatccaggagcaagggttcattgaggaggataaagctcgcaatgaccattacaaagagttaaaaccaatcattgaccgcatctataagacttatgctgatcaatgtctccaactggtacagcttgactgggagaatctatctgcagccatagactcctatcgtaaggaaaaaaccgaagaaacacgaaatgcgctgattgaggagcaagcaacatatagaaatgcgattcatgactactttataggtcggacggataatctgacagatgccataaataagcgccatgctgaaatctataaaggactttttaaagctgaacttttcaatggaaaagttttaaagcaattagggaccgtaaccacgacagaacatgaaaatgctctactccgttcgtttgacaaatttacgacctatttttccggcttttatgaaaaccgaaaaaatgtctttagcgctgaagatatcagcacggcaattccccatcgaatcgtccaggacaatttccctaaatttaaggaaaactgccatatttttacaagattgataaccgcagttccttctttgcgggagcattttgaaaatgtcaaaaaggccattggaatctttgttagtacgtctattgaagaagtcttttcctttcccttttataatcaacttctaacccaaacgcaaattgatctttataatcaacttctcggcggcatatctagggaagcaggcacagaaaaaatcaagggacttaatgaagttctcaatctggctatccaaaaaaatgatgaaacagcccatataatcgcgtccctgccgcatcgttttattcctctttttaaacaaattctttccgatcgaaatacgttatcctttattttggaagaattcaaaagcgatgaggaagtcatccaatccttctgcaaatataaaaccctcttgagaaacgaaaatgtactggagactgcagaagcccttttcaatgaattaaattccattgatttgactcatatctttatttcccataaaaagttagaaaccatctcttcagcgctttgtgaccattgggataccttgcgcaatgcactttacgaaagacggatttctgaactcactggcaaaataacaaaaagtgccaaagaaaaagttcaaaggtcattaaaacatgaggatataaatctccaagaaattatttctgctgcaggaaaagaactatcagaagcattcaaacaaaaaacaagtgaaattctttcccatgcccatgctgcacttgaccagcctcttcccacaacattaaaaaaacaggaagaaaaagaaatcctcaaatcacagctcgattcgcttttaggcctttatcatcttcttgattggtttgctgtcgatgaaagcaatgaagtcgacccagaattctcagcacggctgacaggcattaaactagaaatggaaccaagcctttcgttttataataaagcaagaaattatgcgacaaaaaagccctattcggtggaaaaatttaaattgaattttcaaatgccaacccttgcctctggttgggatgtcaataaagaaaaaaataatggagctattttattcgtaaaaaatggtctctattaccttggtatcatgcctaaacagaaggggcgctataaagccctgtcttttgagccgacagaaaaaacatcagaaggattcgataagatgtactatgactacttcccagatgccgcaaaaatgattcctaagtgttccactcagctaaaggctgtaaccgctcattttcaaactcataccacccccattcttctctcaaataatttcattgaacctcttgaaatcacaaaagaaatttatgacctgaacaatcctgaaaaggagcctaaaaagtttcaaacggcttatgcaaagaagacaggcgatcaaaaaggctatagagaagcgctttgcaaatggattgactttacgcgggattttctctctaaatatacgaaaacaacttcaatcgatttatcttcactccgcccttcttcgcaatataaagatttaggggaatattacgccgaactgaatccgcttctctatcatatctccttccaacgaattgctgaaaaggaaatcatggatgctgtagaaacgggaaaattgtatctgttccaaatctacaataaggattttgcgaagggccatcacgggaaaccaaatctccacaccctgtattggacaggtctcttcagtcctgaaaaccttgcgaaaaccagcatcaaacttaatggtcaagcagaattgttctatcgacctaaaagccgcatgaagcggatggcccatcgtcttggggaaaaaatgctgaacaaaaaactaaaggaccagaagacaccgattccagataccctctaccaagaactgtacgattatgtcaaccaccggctaagccatgatctttccgatgaagcaagggccctgcttccaaatgttatcaccaaagaagtctcccatgaaattataaaggatcggcggtttacttccgataaatttttcttccatgttcccattacactgaattatcaagcagccaatagtcccagtaaattcaaccagcgtgtcaatgcctaccttaaggagcatccggaaacgcccatcattggtatcgatcgtggagaacgcaatctaatctatattaccgtcattgacagtactgggaaaattttggagcagcgttccctgaataccatccagcaatttgactaccaaaaaaaattggacaacagggaaaaagagcgtgttgccgcccgtcaagcctggtccgtcgtcggaacgatcaaagaccttaaacaaggctacttgtcacaggtcatccatgaaattgtagacctgatgattcattaccaagctgttgtcgtccttgaaaacctcaacttcggatttaaatcaaaacggacaggcattgccgaaaaagcagtctaccaacaatttgaaaagatgctaatagataaactcaactgtttggttctcaaagattatcctgctgagaaagtgggaggcgtcttaaacccgtatcaacttacagatcagttcacgagctttgcaaaaatgggcacgcaaagcggcttccttttctatgtaccggccccttatacctcaaagattgatcccctgactggttttgtcgatccctttgtatggaagaccattaaaaatcatgaaagtcggaagcatttcctagaaggatttgatttcctgcattatgatgtcaaaacaggtgattttatcctccattttaaaatgaatcggaatctctctttccagagagggcttcctggcttcatgccagcttgggatattgttttcgaaaagaatgaaacccaatttgatgcaaaagggacgcccttcattgcaggaaaacgaattgttcctgtaatcgaaaatcatcgttttacgggtcgttacagagacctctatcccgctaatgaactcattgcccttctggaagaaaaaggcattgtctttagagacggaagtaatatattacccaaacttttagaaaatgatgattctcatgcaattgatacgatggtcgccttgattcgcagtgtactccaaatgagaaacagcaatgccgcaacgggggaagactacatcaactctcccgttagggatctgaacggggtgtgtttcgacagtcgattccaaaatccagaatggccaatggatgcggatgccaacggagcttatcatattgccttaaaagggcagcttcttctgaaccacctcaaagaaagcaaagatctgaaattacaaaacggcatcagcaaccaagattggctggcctacattcaggaactgagaaactga

SEQ ID NO: 35 - protein, 1307 aa, Acidaminococcus sp.
  Acidaminococcus sp. (strain BV3L6)
MTQFEGFTNLYQVSKTLRFELIPQGKTLKHIQEQGFIEEDKARNDHYKELKPIIDRIYKTYADQCLQLVQLDWENLSAAIDSYRKEKTEETRNALIEEQATYRNAIHDYFIGRTDNLTDAINKRHAEIYKGLFKAELFNGKVLKQLGTVTTTEHENALLRSFDKFTTYFSGFYENRKNVFSAEDISTAIPHRIVQDNFPKFKENCHIFTRLITAVPSLREHFENVKKAIGIFVSTSIEEVFSFPFYNQLLTQTQIDLYNQLLGGISREAGTEKIKGLNEVLNLAIQKNDETAHIIASLPHRFIPLFKQILSDRNTLSFILEEFKSDEEVIQSFCKYKTLLRNENVLETAEALFNELNSIDLTHIFISHKKLETISSALCDHWDTLRNALYERRISELTGKITKSAKEKVQRSLKHEDINLQEIISAAGKELSEAFKQKTSEILSHAHAALDQPLPTTLKKQEEKEILKSQLDSLLGLYHLLDWFAVDESNEVDPEFSARLTGIKLEMEPSLSFYNKARNYATKKPYSVEKFKLNFQMPTLASGWDVNKEKNNGAILFVKNGLYYLGIMPKQKGRYKALSFEPTEKTSEGFDKMYYDYFPDAAKMIPKCSTQLKAVTAHFQTHTTPILLSNNFIEPLEITKEIYDLNNPEKEPKKFQTAYAKKTGDQKGYREALCKWIDFTRDFLSKYTKTTSIDLSSLRPSSQYKDLGEYYAELNPLLYHISFQRIAEKEIMDAVETGKLYLFQIYNKDFAKGHHGKPNLHTLYWTGLFSPENLAKTSIKLNGQAELFYRPKSRMKRMAHRLGEKMLNKKLKDQKTPIPDTLYQELYDYVNHRLSHDLSDEARALLPNVITKEVSHEIIKDRRFTSDKFFFHVPITLNYQAANSPSKFNQRVNAYLKEHPETPIIGIDRGERNLIYITVIDSTGKILEQRSLNTIQQFDYQKKLDNREKERVAARQAWSVVGTIKDLKQGYLSQVIHEIVDLMIHYQAVVVLENLNFGFKSKRTGIAEKAVYQQFEKMLIDKLNCLVLKDYPAEKVGGVLNPYQLTDQFTSFAKMGTQSGFLFYVPAPYTSKIDPLTGFVDPFVWKTIKNHESRKHFLEGFDFLHYDVKTGDFILHFKMNRNLSFQRGLPGFMPAWDIVFEKNETQFDAKGTPFIAGKRIVPVIENHRFTGRYRDLYPANELIALLEEKGIVFRDGSNILPKLLENDDSHAIDTMVALIRSVLQMRNSNAATGEDYINSPVRDLNGVCFDSRFQNPEWPMDADANGAYHIALKGQLLLNHLKESKDLKLQNGISNQDWLAYIQELRN

SEQ ID NO: 36 - DNA, 3741 bp, Lachnospiraceae bacterium
  Lachnospiraceae bacterium (strain ND2006)
atgcttaagaatgttggaattgataggttagatgttgaaaaagggagaaaaaatatgtctaaattagagaagtttacaaattgttactctttgtcaaaaacacttcgttttaaggcgattcctgttggaaaaacccaagaaaatattgataataaaagattgcttgtcgaggatgaaaaacgtgcagaagattataagggggttaaaaaattacttgataggtattatttatcatttattaatgatgttcttcattccattaaactaaagaatttaaataattatatttcgttgtttagaaagaaaactcggacggaaaaagaaaacaaagaattagaaaatttagagataaatttacgtaaagaaatcgctaaggcttttaagggtaatgaaggttataaatctttatttaagaaggatattatcgagacgatattgcctgaatttcttgatgataaagatgaaattgctttggttaattcatttaatggatttacaacggcatttaccggtttttttgataatagggaaaatatgttttcggaagaagctaaatcaacctcaattgcttttcgttgtattaatgagaatttaacaagatatatatcaaatatggatatatttgaaaaagttgatgcaattttcgataagcatgaagtacaggaaataaaagaaaaaattctaaacagtgattatgatgttgaagatttcttcgaaggagaattttttaattttgttcttacgcaagaaggtatcgatgtttataacgctataattggtggctttgtgacagaatccggagaaaaaataaaaggattaaatgaatatattaatttatataatcagaaaactaagcaaaaattaccgaagtttaagcctttatataaacaggttttatcagatagagagtcactttctttttatggcgaaggttatacatctgatgaggaagttttagaagtatttagaaatactcttaataagaattcagaaatattttcttcaattaagaaattggaaaagttatttaaaaacttcgatgaatattcaagtgcaggaattttcgtaaaaaatggaccggctatttctacaatttctaaggatatatttggagagtggaatgtaattagagacaaatggaatgcggagtacgatgatatacatttaaaaaagaaggctgtagtaacagaaaaatatgaagatgacaggcgtaaatcattcaaaaaaataggaagtttttcattggagcagttgcaagaatacgctgatgctgatctatctgtggtagagaagttaaaagaaatcattatccaaaaagtggatgagatatataaagtttatggctcgtcagaaaaattgttcgatgctgattttgtactagaaaaatcgttaaaaaagaatgatgcagttgtagcaataatgaaagatttactagattctgtgaagtcttttgaaaattatataaaagccttttttggagagggaaaagaaacaaatcgagatgaatcattttatggtgattttgttttggcatatgacattcttttgaaagtggatcatatttatgatgcaatacgaaattatgtgacacaaaaaccgtattcgaaagataagtttaaattatattttcaaaacccgcaatttatggggggctgggataaggataaagagacagactatagggcaactatacttagatatggctcaaagtattacttggcgattatggataaaaaatatgctaagtgcttgcaaaaaatagataaggatgatgtaaatggaaactatgaaaaaataaattataagttgcttccaggacctaataagatgcttccaaaggtgttttttagtaagaagtggatggcttattataatccgtcggaagatattcaaaaaatatataaaaatggaacatttaaaaaaggagatatgtttaatttaaatgattgtcataaattaattgatttctttaaggattcaatcagtcggtatccgaaatggagtaacgcatatgattttaacttttctgagaccgagaaatataaggatatagcaggtttttacagagaggttgaagaacaaggatataaagtatcatttgaaagtgcgtctaaaaaagaagttgataaattggtagaagaaggaaaattatacatgttccaaatttataataaagacttttcggataaaagtcatggaacgccaaatcttcatacaatgtattttaagttgctgtttgatgaaaataatcatggtcaaattaggctttctggtggtgctgagctattcatgcgacgtgcaagtttgaaaaaggaagaattagttgtgcatcctgccaatagcccgatagcgaataaaaacccggataatccaaagaaaacgactacgttgtcatatgatgtatacaaggacaaaagattttcggaagatcagtatgagttgcatatacctattgcaataaataaatgccctaaaaatatatttaagataaatacagaggttagagtgctgctgaagcatgatgataatccttatgttataggaattgataggggggagagaaatttactttacattgtggtggttgatggtaagggtaatattgtggagcaatattcgctgaatgaaataattaataattttaatggaattagaattaagacggattaccattcacttttggataaaaaggagaaggaaagatttgaagctcgtcaaaattggacgtctatagaaaacattaaagaactaaaagccggatatattagtcaggttgttcataagatatgtgagttggtagaaaaatatgatgcggtaattgcacttgaagatttgaattctggttttaagaatagtcgagttaaagttgaaaagcaagtatatcagaaatttgaaaaaatgctgattgataaacttaactatatggtagataagaaatctaatccttgcgctacgggtggtgctctgaaaggctatcaaattactaacaagtttgagagttttaagtcgatgagtacacaaaatggttttattttttatattccggcgtggttgactagcaaaattgatccgtcaacaggatttgtaaatttgttgaaaacaaagtatacgagcattgcagattcaaagaaatttataagttcttttgacagaattatgtatgtacctgaagaagatttattcgagtttgcattagattataagaatttttctcggacagacgcggattatataaaaaaatggaaactctatagctatggtaacaggattagaatatttagaaatcctaaaaaaaataatgtatttgattgggaagaggtatgtcttacatcagcctataaggaactttttaataaatatgggattaattatcagcaaggagatatacgagctctcttatgtgaacagagtgataaggcattctatagctcttttatggcattaatgtcactcatgctgcaaatgagaaatagtataacaggtaggacggatgtagattttttgatttcaccagtaaaaaattctgacggtattttttatgattccagaaattatgaagctcaggaaaatgcaatattaccgaaaaatgcagatgctaatggggcttataatatcgcaagaaaagttttgtgggctataggtcagtttaaaaaggctgaagatgaaaaacttgataaggttaaaattgcaatatcaaataaggaatggctcgaatatgcgcaaacaagtgttaagcattga

SEQ ID NO: 37 - protein, 1228 aa, Lachnospiraceae bacterium
  Lachnospiraceae bacterium (strain ND2006)
MSKLEKFTNCYSLSKTLRFKAIPVGKTQENIDNKRLLVEDEKRAEDYKGVKKLLDRYYLSFINDVLHSIKLKNLNNYISLFRKKTRTEKENKELENLEINLRKEIAKAFKGNEGYKSLFKKDIIETILPEFLDDKDEIALVNSFNGFTTAFTGFFDNRENMFSEEAKSTSIAFRCINENLTRYISNMDIFEKVDAIFDKHEVQEIKEKILNSDYDVEDFFEGEFFNFVLTQEGIDVYNAIIGGFVTESGEKIKGLNEYINLYNQKTKQKLPKFKPLYKQVLSDRESLSFYGEGYTSDEEVLEVFRNTLNKNSEIFSSIKKLEKLFKNFDEYSSAGIFVKNGPAISTISKDIFGEWNVIRDKWNAEYDDIHLKKKAVVTEKYEDDRRKSFKKIGSFSLEQLQEYADADLSVVEKLKEIIIQKVDEIYKVYGSSEKLFDADFVLEKSLKKNDAVVAIMKDLLDSVKSFENYIKAFFGEGKETNRDESFYGDFVLAYDILLKVDHIYDAIRNYVTQKPYSKDKFKLYFQNPQFMGGWDKDKETDYRATILRYGSKYYLAIMDKKYAKCLQKIDKDDVNGNYEKINYKLLPGPNKMLPKVFFSKKWMAYYNPSEDIQKIYKNGTFKKGDMFNLNDCHKLIDFFKDSISRYPKWSNAYDFNFSETEKYKDIAGFYREVEEQGYKVSFESASKKEVDKLVEEGKLYMFQIYNKDFSDKSHGTPNLHTMYFKLLFDENNHGQIRLSGGAELFMRRASLKKEELVVHPANSPIANKNPDNPKKTTTLSYDVYKDKRFSEDQYELHIPIAINKCPKNIFKINTEVRVLLKHDDNPYVIGIDRGERNLLYIVVVDGKGNIVEQYSLNEIINNFNGIRIKTDYHSLLDKKEKERFEARQNWTSIENIKELKAGYISQVVHKICELVEKYDAVIALEDLNSGFKNSRVKVEKQVYQKFEKMLIDKLNYMVDKKSNPCATGGALKGYQITNKFESFKSMSTQNGFIFYIPAWLTSKIDPSTGFVNLLKTKYTSIADSKKFISSFDRIMYVPEEDLFEFALDYKNFSRTDADYIKKWKLYSYGNRIRIFRNPKKNNVFDWEEVCLTSAYKELFNKYGINYQQGDIRALLCEQSDKAFYSSFMALMSLMLQMRNSITGRTDVDFLISPVKNSDGIFYDSRNYEAQENAILPKNADANGAYNIARKVLWAIGQFKKAEDEKLDKVKIAISNKEWLEYAQTSVKH

SEQ ID NO: 38 - protein, 1064 aa, Bradyrhizobium sp.
  Bradyrhizobium sp. BTAi1
MKRTSLRAYRLGVDLGANSLGWFVVWLDDHGQPEGLGPGGVRIFPDGRNPQSKQSNAAGRRLARSARRRRDRYLQRRGKLMGLLVKHGLMPADEPARKRLECLDPYGLRAKALDEVLPLHHVGRALFHLNQRRGLFANRAIEQGDKDASAIKAAAGRLQTSMQACGARTLGEFLNRRHQLRATVRARSPVGGDVQARYEFYPTRAMVDAEFEAIWAAQAPHHPTMTAEAHDTIREAIFSQRAMKRPSIGKCSLDPATSQDDVDGFRCAWSHPLAQRFRIWQDVRNLAVVETGPTSSRLGKEDQDKVARALLQTDQLSFDEIRGLLGLPSDARFNLESDRRDHLKGDATGAILSARRHFGPAWHDRSLDRQIDIVALLESALDEAAIIASLGTTHSLDEAAAQRALSALLPDGYCRLGLRAIKRVLPLMEAGRTYAEAASAAGYDHALLPGGKLSPTGYLPYYGQWLQNDVVGSDDERDTNERRWGRLPNPTVHIGIGQLRRVVNELIRWHGPPAEITVELTRDLKLSPRRLAELEREQAENQRKNDKRTSLLRKLGLPASTHNLLKLRLWDEQGDVASECPYTGEAIGLERLVSDDVDIDHLIPFSISWDDSAANKVVCMRYANREKGNRTPFEAFGHRQGRPYDWADIAERAARLPRGKRWRFGPGARAQFEELGDFQARLLNETSWLARVAKQYLAAVTHPHRIHVLPGRLTALLRATWELNDLLPGSDDRAAKSRKDHRHHAIDALVAALTDQALLRRMANAHDDTRRKIEVLLPWPTFRIDLETRLKAMLVSHKPDHGLQARLHEDTAYGTVEHPETEDGANLVYRKTFVDISEKEIDRIRDRRLRDLVRAHVAGERQQGKTLKAAVLSFAQRRDIAGHPNGIRHVRLTKSIKPDYLVPIRDKAGRIYKSYNAGENAFVDILQAESGRWIARATTVFQANQANESHDAPAAQPIMRVFKGDMLRIDHAGAEKFVKIVRLSPSNNLLYLVEHHQAGVFQTRHDDPEDSFRWLFASFDKLREWNAELVRIDTLGQPWRRKRGLETGSEDATRIGWTRPKKWP

SEQ ID NO: 39 - protein, 1035 aa, Candidatus Puniceispirillum marinum
MRRLGLDLGTNSIGWCLLDLGDDGEPVSIFRTGARIFSDGRDPKSLGSLKATRREARLTRRRRDRFIQRQKNLINALVKYGLMPADEIQRQALAYKDPYPIRKKALDEAIDPYEMGRAIFHINQRRGFKSNRKSADNEAGVVKQSIADLEMKLGEAGARTIGEFLADRQATNDTVRARRLSGTNALYEFYPDRYMLEQEFDTLWAKQAAFNPSLYIEAARERLKEIVFFQRKLKPQEVGRCIFLSDEDRISKALPSFQRFRIYQELSNLAWIDHDGVAHRITASLALRDHLFDELEHKKKLTFKAMRAILRKQGVVDYPVGFNLESDNRDHLIGNLTSCIMRDAKKMIGSAWDRLDEEEQDSFILMLQDDQKGDDEVRSILTQQYGLSDDVAEDCLDVRLPDGHGSLSKKAIDRILPVLRDQGLIYYDAVKEAGLGEANLYDPYAALSDKLDYYGKALAGHVMGASGKFEDSDEKRYGTISNPTVHIALNQVRAVVNELIRLHGKPDEVVIEIGRDLPMGADGKRELERFQKEGRAKNERARDELKKLGHIDSRESRQKFQLWEQLAKEPVDRCCPFTGKMMSISDLFSDKVEIEHLLPFSLTLDDSMANKTVCFRQANRDKGNRAPFDAFGNSPAGYDWQEILGRSQNLPYAKRWRFLPDAMKRFEADGGFLERQLNDTRYISRYTTEYISTIIPKNKIWVVTGRLTSLLRGFWGLNSILRGHNTDDGTPAKKSRDDHRHHAIDAIVVGMTSRGLLQKVSKAARRSEDLDLTRLFEGRIDPWDGFRDEVKKHIDAIIVSHRPRKKSQGALHNDTAYGIVEHAENGASTVVHRVPITSLGKQSDIEKVRDPLIKSALLNETAGLSGKSFENAVQKWCADNSIKSLRIVETVSIIPITDKEGVAYKGYKGDGNAYMDIYQDPTSSKWKGEIVSRFDANQKGFIPSWQSQFPTARLIMRLRINDLLKLQDGEIEEIYRVQRLSGSKILMAPHTEANVDARDRDKNDTFKLTSKSPGKLQSASARKVHISPTGLIREG

SEQ ID NO: 40 - protein, 1358 aa, Acidaminococcus sp.
MGKMYYLGLDIGTNSVGYAVTDPSYHLLKFKGEPMWGAHVFAAGNQSAERRSFRTSRRRLDRRQQRVKLVQEIFAPVISPIDPRFFIRLHESALWRDDVAETDKHIFFNDPTYTDKEYYSDYPTIHHLIVDLMESSEKHDPRLVYLAVAWLVAHRGHFLNEVDKDNIGDVLSFDAFYPEFLAFLSDNGVSPWVCESKALQATLLSRNSVNDKYKALKSLIFGSQKPEDNFDANISEDGLIQLLAGKKVKVNKLFPQESNDASFTLNDKEDAIEEILGTLTPDECEWIAHIRRLFDWAIMKHALKDGRTISESKVKLYEQHHHDLTQLKYFVKTYLAKEYDDIFRNVDSETTKNYVAYSYHVKEVKGTLPKNKATQEEFCKYVLGKVKNIECSEADKVDFDEMIQRLTDNSFMPKQVSGENRVIPYQLYYYELKTILNKAASYLPFLTQCGKDAISNQDKLLSIMTFRIPYFVGPLRKDNSEHAWLERKAGKIYPWNFNDKVDLDKSEEAFIRRMTNTCTYYPGEDVLPLDSLIYEKFMILNEINNIRIDGYPISVDVKQQVFGLFEKKRRVTVKDIQNLLLSLGALDKHGKLTGIDTTIHSNYNTYHHFKSLMERGVLTRDDVERIVERMTYSDDTKRVRLWLNNNYGTLTADDVKHISRLRKHDFGRLSKMFLTGLKGVHKETGERASILDFMWNTNDNLMQLLSECYTFSDEITKLQEAYYAKAQLSLNDFLDSMYISNAVKRPIYRTLAVVNDIRKACGTAPKRIFIEMARDGESKKKRSVTRREQIKNLYRSIRKDFQQEVDFLEKILENKSDGQLQSDALYLYFAQLGRDMYTGDPIKLEHIKDQSFYNIDHIYPQSMVKDDSLDNKVLVQSEINGEKSSRYPLDAAIRNKMKPLWDAYYNHGLISLKKYQRLTRSTPFTDDEKWDFINRQLVETRQSTKALAILLKRKFPDTEIVYSKAGLSSDFRHEFGLVKSRNINDLHHAKDAFLAIVTGNVYHERFNRRWFMVNQPYSVKTKTLFTHSIKNGNFVAWNGEEDLGRIVKMLKQNKNTIHFTRFSFDRKEGLFDIQPLKASTGLVPRKAGLDVVKYGGYDKSTAAYYLLVRFTLEDKKTQHKLMMIPVEGLYKARIDHDKEFLTDYAQTTISEILQKDKQKVINIMFPMGTRHIKLNSMISIDGFYLSIGGKSSKGKSVLCHAMVPLIVPHKIECYIKAMESFARKFKENNKLRIVEKFDKITVEDNLNLYELFLQKLQHNPYNKFFSTQFDVLTNGRSTFTKLSPEEQVQTLLNILSIFKTCRSSGCDLKSINGSAQAARIMISADLTGLSKKYSDIRLVEQSASGLFVSKSQNLLEYL

SEQ ID NO: 41 - protein, 1358 aa, Acidaminococcus sp.; identical to SEQ ID NO: 40
  Acidaminococcus sp. D21

SEQ ID NO: 42 - protein, 1138 aa, Acidothermus cellulolyticus
MGGSEVGTVPVTWRLGVDVGERSIGLAAVSYEEDKPKEILAAVSWIHDGGVGDERSGASRLALRGMARRARRLRRFRRARLRDLDMLLSELGWTPLPDKNVSPVDAWLARKRLAEEYVVDETERRRLLGYAVSHMARHRGWRNPWTTIKDLKNLPQPSDSWERTRESLEARYSVSLEPGTVGQWAGYLLQRAPGIRLNPTQQSAGRRAELSNATAFETRLRQEDVLWELRCIADVQGLPEDVVSNVIDAVFCQKRPSVPAERIGRDPLDPSQLRASRACLEFQEYRIVAAVANLRIRDGSGSRPLSLEERNAVIEALLAQTERSLTWSDIALEILKLPNESDLTSVPEEDGPSSLAYSQFAPFDETSARIAEFIAKNRRKIPTFAQWWQEQDRTSRSDLVAALADNSIAGEEEQELLVHLPDAELEALEGLALPSGRVAYSRLTLSGLTRVMRDDGVDVHNARKTCFGVDDNWRPPLPALHEATGHPVVDRNLAILRKFLSSATMRWGPPQSIVVELARGASESRERQAEEEAARRAHRKANDRIRAELRASGLSDPSPADLVRARLLELYDCHCMYCGAPISWENSELDHIVPRTDGGSNRHENLAITCGACNKEKGRRPFASWAETSNRVQLRDVIDRVQKLKYSGNMYWTRDEFSRYKKSVVARLKRRTSDPEVIQSIESTGYAAVALRDRLLSYGEKNGVAQVAVFRGGVTAEARRWLDISIERLFSRVAIFAQSTSTKRLDRRHHAVDAVVLTTLTPGVAKTLADARSRRVSAEFWRRPSDVNRHSTEEPQSPAYRQWKESCSGLGDLLISTAARDSIAVAAPLRLRPTGALHEETLRAFSEHTVGAAWKGAELRRIVEPEVYAAFLALTDPGGRFLKVSPSEDVLPADENRHIVLSDRVLGPRDRVKLFPDDRGSIRVRGGAAYIASFHHARVFRWGSSHSPSFALLRVSLADLAVAGLLRDGVDVFTAELPPWTPAWRYASIALVKAVESGDAKQVGWLVPGDELDFGPEGVTTAAGDLSMFLKYFPERHWVVTGFEDDKRINLKPAFLSAEQAEVLRTERSDRPDTLTEAGEILAQFFPRCWRATVAKVLCHPGLTVIRRTALGQPRWRRGHLPYSWRPWSADPWSGGTP

SEQ ID NO: 43 - protein, 1045 aa, Acidovorax avenae
MQKEKPLAYRLALDLGSTSLGWAVLRLSAPGEPSAVIRAGSRIFSDGRNPKDGSSLAVTRRAARAMRRRRDRLLKRKARMLAALERHGFFPQDEAARKALEKLNPYGLRARGLESALKPEEFGRALFHLNQRRGFQSNRKTDRKDSDSGALKQAIGTLRAQMHESGCRTVGEWFWKVRMERKPEGVKGQGVRARYRETPFTTDEGKKRIDKRYDLYVDRAMVAQEFDALWAAQATFAPALFNEAARAELRDILLHQRKLRPVQPGRCTLVPEEPRALLALPSTQRFRIYQEVNHLRVLHDELREEALTLAQRDQIVALLERQAKVTFTAMRKALGFSALFNLEDAKRDGLKGNATTAALGKKDLFGPLWAGFDTALQDEIVTQLMTEESEPRLIAWLQEHTGVDEARAQAIANAGLPEGYGSLGRTALARIVPELQRDVITYDKAVQAAGFAHHSDLGFSFEHDADEVERIGERTIASTGEIKPVFAFKQLPYYGRALQRHVAFAKENPRNDEERYGKIANPTVHIGLNQVRVVVNALMCRYGRPTEVVIELARDLKQSREQKLEAQQRQADNQKRNARIRRSIAEVLGISEERVRTLDIQKWILWEELSHDAADRRCPYSGVQISASMLLGERVEIEHILPFSMTLDDSLNNRTVALREANRIKRNRTPWDARTDFEAHGWSYDGILQRAERMPQRKRHRFAPDGYERWLGEDKDFLARALNDTRYLSRVAAEYLRLVCPGSATRVIPGQMTALLRGKFGLNDVLGLDGEKNRNDHRHHAVDACVIGVTDQRMMQRFAQANAQAREDGLTRLVEDMPLPWPTYRAHVERAVRHIWVSHKPDHGFEGAMMEETSYGILRDGTIKQRRKADGSAGREISRLIRITEPSQPQRHGVDAEGRPLPYKGYVGGSNYCLEITVNDKGKWEGQVISTFDAYRIVREGGLRQLRHSTQGQNGQALAMRLVIGDSVRLEVDEQERVMRIVKINGNNGQVFMAPVHEANVDARNSDKNEAFAYTSKIAGSFQKTKARQVTISPIGELRDPGFKG

SEQ ID NO: 44 - protein, 1131 aa, Acidovorax ebreus
MAQHVFGLDIGIASVGWAILGEQRIIDLGVRCFDKAETAKEGDPLNLTRRQARLLRRRLYRRAWRLTQLSRLLKRKGLIADAKLFAKAPSYGDSAWELRRQGLDRLLTPLEWARVIYHQCKHRGFHWTSKAEEAKADSDAEGGRVKQGLAHTKALMQAKNYRSAAEMVLAEFPDAQRNKRGQYDKALSRVLLGEELALLFATQRRLGNPHASDFFEKLILGDGDRKSGLFWQQKPALSGADLLKMLGKCTFEKGEYRAPKASFSVERHVWLTRLNNLRIVVDGRSRPLNEAERQAALLLPYQTETSKYKTLKNAFIKAGLWGDGVRFGGLAYPSQAQIDAEKTKDPEDQFLVKLPAWHELRKAFKAAGHEALWQQISTPALDGDPTLLDQIATVLSVYKDGAEVVQQLRQLALPEPAASIAVLEKISFDKFSSLSLKALRRIVPLMQSGLRYDEAVAQIPEYGHHSQRIEPGAAKHLYLPPFYEAQRKYAGKGDHIGSMQFRDDADIPRNPVVLRALNQARKVVNALIREYGSPIAVNIEMARDLSRPLDERNKVKRAQEEFRDRNDRARSEFERDFGYKPKAAAFEKWMLYREQLGQCAYSQQPLDIQRVLDDHNYAQVDHALPYSRSYDDSKNNKVLVLTHENQNKGNRTAFEYLTSFPDGEDGERWRTFVAWVQGNKAYRMAKRNRLLRKNYGVDESKGFIDRNLNDTRYICKFFKNYVEEHLQLAARADGDTARRCVVVNGQLTAFLRARWGLTKVRGDSDRHHALDAAVVAACTHGMVKALADYSRRKEISFLQEGFPDPETGEILNPAAFDRARQHFPEPWTHFAHELKARLFTDDLAALREDMQRLGSYTTEDLGRLRTLFVSRAPQRRSGGAVHKETIYAQPESLKQQGGVIEKILLTSLKLQDFDKLLNPESNDHFVEPHRNERLYAAIRQRLEQFGGRADKAFGPDNLFHKPDKNNQPTGPVVRSIKLVRGKQTGIPIRGGLAKNDSMLRVDIFTKAGKFHLVPVYVHHRVTGLPNRAIVAFKDEDEWTLIDESFAFLFSVYPNDYVKVTLKKEQQSGYYSGADRSTGAMNLWAHDRAASVGKDGLIRGIGVKTALSVEKFNVDVLGRIYLAPPETRSGLA

SEQ ID NO: 45 - protein, 1056 aa, Actinobacillus minor
  Actinobacillus minor NM305
MKALNYILGLDLGIASVGWAVVEIDQNELPIRLIDLGVRTFERAEVPKTGDSLALARRLARSSRRLVRRRAVRLLKAKRLLKQEGILQADDFHSSHLKPLPNNPWELRVKGLNHLLDRKEWAAVLLHLLKHRGYLSQRKNESKTDNKELGALLKGVSENRQLLQAQAFSTPAEIAIKKFQQEEGHIRNQRGAYSHTFDRNDLLAELRLLFQKQREFNNPYTSQSLEQAIAELLMWQKPALSGEAILKMLGKCTFEPSEYKAPKNSYSAEYFVWLTKLNNLRILENGADRGLTAEERQLLINQPFEKAKFTYAQARKLLELSDLAIFKGVRYGKDNAESATLMEMKAWHAIRKALESNGLKTEWNGLKTKPELLDKIGTAFSIYKTDEDISQYLNGELSPAVLNALLENLSFDKFIRLSLQSLAKILPLMEQGLRYDEACKQVYGDHYGKKEQLELRFLPKIPVEDIRNPVVLRTLSQARKVINGVVRLYGSPARIHIETGREVGKSFSERRDISKRQEENRNERQRAVEKFKEFFPHFVGEPKAKDILKMRLYEQQHGKCLYSGKELDLNRLLEKGYVEIDHALPFSRTWDDSFNNKVLVLASENQNKGNQTPYEWLNGKENAERWKLFQALVNGSRFPYSKKQRILTKYLDEDGFRERNLNDTRYVARFLCNFIEDNMQLVGQGKKRVFASNGQITALLRRSWGIQKVREDNDRHHAVDAVVVACSTRALQKKITDYVRYKEMNVFTGEKIDQETGEIIKFHFPEPWKFFRQEVEIRVFSETPAEDVVIALPDRPQANHEFIQPLFVSRAPTRKMTGQGHMETIKSAKRLAEGLSVSRVPLTQLKLKDLENMVNREREKALYEALKVRLEKFNNDPAKAFADPFYKKGGQQVKAVRVEQVQKSGVLVRQENGVADNASMVRVDVFIKGGKYFLVPIYTWQVAKGILPNRAATQGKEEEYWDIMDETAIFQFSLYQNDLIKLVTKKKTIFGYFNGLNRATSNINIKEHDLDKSKGKDGIYLEVGVKLALSLEKYQVDELGKNIQPCRSMKKRPPVR

SEQ ID NO: 46 - protein, 1054 aa, Actinobacillus pleuropneumoniae
  Actinobacillus pleuropneumoniae serovar 10 str. D13039
MKLTPLNYILGLDLGIASVGWAVVEIDEQENPLGLIDVGVRTFDRAEVAKTGESLALARRLARSSRRLVKRRADRIKKVKRLLKSENILLSADEQLPNDVWQLRVKGLDQKLERQEWAAVLLHLLKHRGYLSQRKNESKSENKELGALRSGVAANHQILQSAEYRTPAEIAVKKFHVEEGHIRNQRGAYTHTFSRLDLLAEIELLFTRQTELGNPHTSAKLLENLTALLMWQKPALAGEAILKMLGKCTFEPTEYKAAKNSYSAERFVWLTKLNNLRILEQGAERALTDNERFALLDQPYEKAKFTYAQARTMLALPDEAIFKGVRYQGEDKKAVETKTILMEMKAYHQIRKALENADLKAEWNELKNNSELLDDIGTAFSLHKTDEDICRYLDGKLSESILNALLENLNFDKFIQLSLKALQQILPLMLQGQRYDEAVSAIYGDHYGKKSAEINRLLPTIPADEIRNPVVLRTLTQARKVINAVVRLYGSPARIHIETGREVGKSYQDRKKLEKQQEDNRKHRESAVQKFKEYFPNFVGEPKGKDILKMRLYELQQAKCLYSGKSLELHRLLEKGYVEVDHALPFSRTWDDSFNNKVLVLANENQNKGNLTPYEWLDGKNNSEPWQNFVARVQTSGFSHTKKQRILSHKLDEKGFIERNLNDTRYVVRFLCNFIADNMLLTGKGKRKVFASNGQITALLRGRWGLQKVRDDNDRHHALDAVVVACSTVAMQQKITRFVRYEEGNVFSGERIDRETGEIIPLHFPSPWAFFRENVEIRIFSENPKLELENRLPDYPQYNHEFVQPLFVSRMPTRKMTGQGHMETVKSAKRLDEGLSVLKVPLTQLKLNDLERMVNREREMALYESLKVRLEQFDNDPAKAFAEPFYKKGGALVKAVRVEQTQKSGVLVRDGNGVADNASMVRVDVFTKAGKYFLVPIYTWQVAKGILPNKAVTANVDEIDWLEMDESYQFIFTMYPNDLVKVKLKKEEFFGYYGGLDRATGAIVIKEHDLEKSKGRQGIYRIGVKLALSFEKYQVDELGKNIRPCRPTKRQHVR

SEQ ID NO: 47 - protein, 1062 aa, Actinobacillus succinogenes
MNLNYILGLDLGIASVGWAVVEIDEQENPQRLIDVGVRTFDRAEVLKTGESLALARRLARSSRRLVKRRAERIKKAKRLLKAENLLLSADEILPNEAWQLRVKGLDQKLERQEWAAVLLHLLKHRGYLSQRKNESKSENKELGALLSGVAINHQILQSAEYRTPAEIAVNKFQAEEGHIRNQRGAYTHTFSRLDLLAEMELLFQRQATLGNPHTSTKLLENLTALLMWQKPALAGEAILKMLGKCTFEPTEYKAAKNSYSAERFVWLTKLNNLRILEQGAERALTDNERFALLDQPYEKAKLTYAQVRTLLGLSDEAIFKGLRYQGEDKKAVETKTTLMEVKAYHQIRKALEGLDLKAEWNELKNNPALLDEIGTAFSLYKTDDDIHRYLDGKLSESVLNALLENLNFDKFIQLSLKALQQILPLMLQGQRYDEAVSAIYGDHYGKKSDEIDRLLPNIPTDEIRNPVVLRTLTQARKVINAVVRLYGSPARIHIETGREVGKSYQDRKKLEKQQEENRKQRENAVKKFKEYFPNFVGEPKGKDILKMRLYELQQAKCLYSGKSLELYRLLEKGYVEVDHALPFSRTWDDSFNNKVLVLANENQNKGNATPYEWLDGKNNSEGWQHFVARVQTSGFSYAKKQRVLIQELDEKSFIERNLNDTRYVARFLCNHIADNMLLTGKGKRKVFASNGQITALLRGCWGLQKVRENNDRHHALDAVVVACSTKSMQDKITKFVKYKEGRLFKDKKDGVYKGERINRETGEIISLHFPTPWKFFKENVEIRIFSENPKLELENRLPDYPQYNHEFVQPLFVSRMPTRKMTGQGHMETVKSAKRLDKGLSVLKVPLTQLKLSDLERMVNREREMALYEALKECLEQFGNDPAKAFAEPFYKKGGALVKAVRVEQTQKSGVLVRNGNGVADNATGSIVRVDVFTKGGKYFLVPIYTWQVAKGILPNKAVIQGKDESEWEEMDENAVFQFSMHKNDLIKVKTKKGEIFGYFNGLDRATGSIEIEEHDLEKSKGKNGSHRGLGVKTAFFLEKYQVDELGKNIRPCRPTKRQHVR

SEQ ID NO: 48 - protein, 1054 aa, Actinobacillus suis
MKLTPLNYILGLDLGIASVGWAVVEIDEQENPLGLIDVGVRTFDRAEVPKTGESLALARRLARSARRLVKRRADRIKKAKRLLKAENILLSADEHLPNDVWQLRVKGLDQKLERQEWAAVLLHLLKHRGYLSQRKNESKSENKELGALLSGVETNHQILQSAEYRTPAEIAVKKFHVEDGHIRNQRGAYTHTFSRLDLLAEMELLFQRQTDLGNPHTSAKLLENLTALLMWQKPALAGEAILKMLGKCTFEPTEYKAAKNSYSAERFVWLTKLNNLRILEQGAERALTDNERFALLDQPYEKAKFTYAQARTMLALPDEAIFKGVRYQGEDKKAVETKTILMEMKAYHQIRKALENADLKAEWNELKNNSELLDDIGTAFSLHKTDEDICRYLDGKLSESILNALLENLNFDKFIQLSLKALQQILPLMLQGQRYDEAVSAIYGDHYGKKSAEINRLLPTIPADEIRNPVVLRTLTQARKVINAVVRLYGSPARIHIETGREVGKSYQDRKKLEKQQEDNRKQRESAVKKFKEYFPNFVGEPKGKDILKMRLYELQQAKCLYSGKSLELHRLLEKGYVEVDHALPFSRTWDDSFNNKVLVLANENQNKGNLTPYEWLDGKNNSEHWQNFVARVQTSGFSHTKKQRILSHKLDEKGFIERNLNDTRYVARFLCNFIADNMLLTGKGKRKVFASNGQITALLRGRWGLQKVRDDNDRHHALDAVVVACSTVVMQQKITRFVRYEEGNVFSGERIDRETGEIIPLHFPSPWAFFRENVEIRIFSENPKLELENRLPDYPQYNHEFVQPLFVSRMPTRKMTGQGHMETVKSAKRLDEGLSVLKVPLTQLKLSDLERMVNREREVTLYESLKARLEQFGNDPAKAFAEPFHKKGGAVVKAVRVEQTQKSGVLVRDGNGVADNASMVRVDVFTKGGKYFLVPIYTWQVAKGILPNKAVTANVDEIDWLEMDESYQFIFTMYPNDLVKVKLKKEEFFGYYGGLDRATGAIVIKEHDLEKSKGKQGIYRIGVKLALSFEKYQVDELGKNIRPCRPTKRQHVR

SEQ ID NO: 49 - protein, 1105 aa, Actinomyces coleocanis
  Actinomyces coleocanis DSM 15436
MDNKNYRIGIDVGLNSIGFCAVEVDQHDTPLGFLNLSVYRHDAGIDPNGKKTNTTRLAMSGVARRTRRLFRKRKRRLAALDRFIEAQGWTLPDHADYKDPYTPWLVRAELAQTPIRDENDLHEKLAIAVRHIARHRGWRSPWVPVRSLHVEQPPSDQYLALKERVEAKTLLQMPEGATPAEMVVALDLSVDVNLRPKNREKTDTRPENKKPGFLGGKLMQSDNANELRKIAKIQGLDDALLRELIELVFAADSPKGASGELVGYDVLPGQHGKRRAEKAHPAFQRYRIASIVSNLRIRHLGSGADERLDVETQKRVFEYLLNAKPTADITWSDVAEEIGVERNLLMGTATQTADGERASAKPPVDVTNVAFATCKIKPLKEWWLNADYEARCVMVSALSHAEKLTEGTAAEVEVAEFLQNLSDEDNEKLDSFSLPIGRAAYSVDSLERLTKRMIENGEDLFEARVNEFGVSEDWRPPAEPIGARVGNPAVDRVLKAVNRYLMAAEAEWGAPLSVNIEHVREGFISKRQAVEIDRENQKRYQRNQAVRSQIADHINATSGVRGSDVTRYLAIQRQNGECLYCGTAITFVNSEMDHIVPRAGLGSTNTRDNLVATCERCNKSKSNKPFAVWAAECGIPGVSVAEALKRVDFWIADGFASSKEHRELQKGVKDRLKRKVSDPEIDNRSMESVAWMARELAHRVQYYFDEKHTGTKVRVFRGSLTSAARKASGFESRVNFIGGNGKTRLDRRHHAMDAATVAMLRNSVAKTLVLRGNIRASERAIGAAETWKSFRGENVADRQIFESWSENMRVLVEKFNLALYNDEVSIFSSLRLQLGNGKAHDDTITKLQMHKVGDAWSLTEIDRASTPALWCALTRQPDFTWKDGLPANEDRTIIVNGTHYGPLDKVGIFGKAAASLLVRGGSVDIGSAIHHARIYRIAGKKPTYGMVRVFAPDLLRYRNEDLFNVELPPQSVSMRYAEPKVREAIREGKAEYLGWLVVGDELLLDLSSETSGQIAELQQDFPGTTHWTVAGFFSPSRLRLRPVYLAQEGLGEDVSEGSKSIIAGQGWRPAVNKVFGSAMPEVIRRDGLGRKRRFSYSGLPVSWQG

SEQ ID NO: 50 - protein, 1113 aa, Actinomyces georgiae
  Actinomyces georgiae F0490
MSASSQNVERIRYKVGIDVGLRSIGFCAVQVDADDRPVKLLNTVVHVHDAGVSPADAKKADTRKLVSGVARRTRRLYRTRKRRLVDLDRQLDGLGWPLVDPARFADPREPWFAREKLVSGRVDDADERKELLSVALRHIAHHRGWRNPYSTVESLQADAPPSEFLQGLNQRVSEKLGTELDPGLTQGQLVAKLLHRFPNAKIRGPEGILRGKLHQSDNAGELRLICRTQGLDCHITEELVRLVFQAKSPKANKEMRKRIGRDQLPGQGAHIRAEKAHPVFQRFRIVAVLANLRIREAHVDRRLTAEEMRTLTDFLLGLAGSEQPTWEELADNLNIERHQLRGTAKASVDGAPALRFPPIDATTDRIYASKLKWLAEWWRQADEERRGYMVDALSNSGGSEDEPYLDDEIAEMLEQASEEDQAKLDSLHLPGGRASYCLDTLRRLTDAMLGGGLDLFEARKAVFHVDDDWAPPTDPIGAPVGNPPVDRVLKHVARWLEAATGRWGAPQTINIEHVREGLGSEKAARELTRMNDRRRRNNQKLVEEMGEKLGMSGRIRRSDRMRYEAIRRQNCECLYCGQPITYQTMEMDHIVPRAGAASTNSRSNLAAVCRRCNHQKGKLPFAVWAESQDSPAEVRLQDAVQRVRHWLRDAGMGQKELQALRVQVIARLKSKRPDEEFDGRSMESIAWMANELRARVEAQYRGSGTTVRVYRGALTAEARKASGFEGRVNLIGGRGKDRFDRRHHAMDALVIALMNQSVAQTLALRLNMRDSQWLTQSEQTWRQFHGAPGEAARKWEAWDRDMRDASDLFNLALDGGRIPITENVRLRVGNGRVHEDGVIRFKPEYEVKGKTIKGGEARLLGDSLPSEQIDRAETPALWTALTRLPEYDRKSGLPENPDRVIRVNGAVVQATDRIRFFGTPASVAVRGGYAKLGESIHHARIYRINGKTPKYAMIRVYTIDLMRLNHEDIFTAVLKPSTISMRCAEKKLKYAIAEGNAEQIGWLVEGDQLELDAAAYAKGVGADLMREYPMATCWRVAGFPDEAKLRLRPVLLAAEGMGEDAPKFMREVLENQGWRPAVNALLSPGSVRVVRRNVLGEPRFKSSGHLPTTVDLV

SEQ ID NO: 51 - protein, 1101 aa, Actinomyces naeslundii
  Actinomyces naeslundii str. Howell 279
MWYASLMSAHHLRVGIDVGTHSVGLATLRVDDHGTPIELLSALSHIHDSGVGKEGKKDHDTRKKLSGIARRARRLLHHRRTQLQQLDEVLRDLGFPIPTPGEFLDLNEQTDPYRVWRVRARLVEEKLPEELRGPAISMAVRHIARHRGWRNPYSKVESLLSPAEESPFMKALRERILATTGEVLDDGITPGQAMAQVALTHNISMRGPEGILGKLHQSDNANEIRKICARQGVSPDVCKQLLRAVFKADSPRGSAVSRVAPDPLPGQGSFRRAPKCDPEFQRFRIISIVANLRISETKGENRPLTADERRHVVTFLTEDSQADLTWVDVAEKLGVHRRDLRGTAVHTDDGERSAARPPIDATDRIMRQTKISSLKTWWEEADSEQRGAMIRYLYEDPTDSECAEIIAELPEEDQAKLDSLHLPAGRAAYSRESLTALSDHMLATTDDLHEARKRLFGVDDSWAPPAEAINAPVGNPSVDRTLKIVGRYLSAVESMWGTPEVIHVEHVRDGFTSERMADERDKANRRRYNDNQEAMKKIQRDYGKEGYISRGDIVRLDALELQGCACLYCGTTIGYHTCQLDHIVPQAGPGSNNRRGNLVAVCERCNRSKSNTPFAVWAQKCGIPHVGVKEAIGRVRGWRKQTPNTSSEDLTRLKKEVIARLRRTQEDPEIDERSMESVAWMANELHHRIAAAYPETTVMVYRGSITAAARKAAGIDSRINLIGEKGRKDRIDRRHHAVDASVVALMEASVAKTLAERSSLRGEQRLTGKEQTWKQYTGSTVGAREHFEMWRGHMLHLTELFNERLAEDKVYVTQNIRLRLSDGNAHTVNPSKLVSHRLGDGLTVQQIDRACTPALWCALTREKDFDEKNGLPAREDRAIRVHGHEIKSSDYIQVFSKRKKTDSDRDETPFGAIAVRGGFVEIGPSIHHARIYRVEGKKPVYAMLRVFTHDLLSQRHGDLFSAVIPPQSISMRCAEPKLRKAITTGNATYLGWVVVGDELEINVDSFTKYAIGRFLEDFPNTTRWRICGYDTNSKLTLKPIVLAAEGLENPSSAVNEIVELKGWRVAINVLTKVHPTVVRRDALGRPRYSSRSNLPTSWTIE

SEQ ID NO: 52 - protein, 1144 aa, Actinomyces sp.
  Actinomyces sp. ICM47
MSMIDSSENVPGIRYRVGIDVGLKSIGFCAVEVDRNDQPVRMLNSMVFIHDAGVDPNENKAAKSRKLTAGVARRTRRLYRTRHQRLVNLDRVLSKEFGWPLPDLTSFKDPREPWHVRAGLLEGYIADDEKRKEALSIALRHIARHRGWRNPYAKVETLLQPSEPSDFLKGLNDRISEELGRAFPADATPGQLVDTYLAHPDYVGRAGTPKLRGPQGILAGKLHQSDNAQEIRGICDVQRIEPAERDRLIRVVFEAKSPKGSAKERGLVGYDELPGQGRHVRAEKAHPAFQLFRMVSVLANLRIREGREERPLTPDELEDLVDFINQVSLKQEVTWQDLADKLRIERADLRGTAKASFDGSPVLRNPPTDVTTEKIMACKVKWLKEWWKEADDEQRGYMVDAFSNSGGSEDGTDVNDEVAELLEQATEDDQLEFEKISLPQGRAAYSLDSLRRLTDRMLRDGVDLHTARRLEFNVGDDWKPAVEPIGAPTGNPAVDRVLKQVSRWLHAATERWGEPTVINIEHARDGLGSERVARELMRENEKRRKANASAVAEMAAKLKLSGKVHRSDQIRYFALQRQNCQCLYCGAPITYTTAEMDHIVPRADGSSTNDRSNLAAVCRTCNHMKGKIPFAVWASSDKANQGVSLTGALERVNMWQRDSGMSPRQLKQLQREVCARLKSKKPDQEFDGRSMESVAWMAVELRTRIEGFYRSRDEESVPSVGVYRGQLTAEARRASGFESRVNLIGGRGKTRFDRRHHAMDALVIALMNPSVSRTLALRLNMRDAQRLTGVEETWKHFYGKPGEASKRFESWRESMLRGVELFNIALSDNAIPFVENIRLRVGSSVIHDATVHSFCPPKTPDGKQIITKGYGEQHSLGSAMPVELIDRAETPALWTALTRCPDFDPKKGLPENPQRTISVNGTRVGPTELVNFFEFSKSGPKACLKVRGGYVDLSGAIHHARIYRIAGKKTAYAMIRVFQVDLLRLKDHDVFTTPLKPSTISMRTAEPKIREALANGTATQIGWLVEGDELVIDTSKYSGGFIGEVLARYPEATSWRVAGFMTPAKLRIKPILLSKEGFVDETQAALLGVEVTSEAIQKTVDRPGWLPAVNVLFGAGGVRVIRRNCLGEERYHSSASLPVSMTLE

SEQ ID NO: 53 - protein, 1095 aa, Actinomyces sp.
  Actinomyces sp. oral taxon 175 str. F0384
MPAHHLRVGIDVGTHSVGLATLRVDDQGTPIELLSALSHIHDSGIGKEGQKDHDTRKKLSGVARRTRHLLRNRRERLQQLDKVLVDLGFPIPKPEEYPDLSERTDPYRVWRVRARLVEETLPEELRGPAISMAVRHIARHRGWRNPYSKVESLLSPAEESSFMKALRKRIMTKTGEVLDDDITPGQAMAQVALTHKIYMRGPEGILGKLHQSDNANEIRKICARQGISSDVCKQLLRAVFKAESPRGSAVSRVAPDPLPGQGSFRRAPKCDPEFQRFRIISIVANLRISETKGENRPLTVDERRQVVAFLMEDSQADLTWVDVAEKLRVSRQALRGTAMLTADGERSAAQPPIDVTDQIMRKTKISALKTWWDKADAERRGAMVRYLYEGLEDSECAEVIAKLPEKDHAKLDSLHLPAGRAAYSRESLTALSDHMLETTNDLHEARKRLFGVDDSWAPPAEPVGAPVGNPSVDRTLKIVARYLSAVESIWGTPEVIHVEHVRDGFTSERTAEERDKANRSRHNDNQKAIEKIQHDYGKEGYISRGDIVRFHALKLQGSACLYCGTTIGYHTCQLDHIVPQAGPGSNNRRGNLVAVCERCNHSKSNTPFAVWAQKCGIPHVGVKEAISRVNGWVEHNHSTSSGDLTRLKKEVIARLRRTQKDPEIDERSMESVAWMANELHHRIAAAYPETTVMVYRGSITAAARKAASIESRINLIGEKGRKDRLDRRHHAVDASVVALMEPSVAKTLAERSSLRGEQRLTGQEQTWKQYTGLTVGARERFEAWRGHMHRLTELFNESLAADEVYVTQNIRLRLSDGSAHTVKASKLVSHRLGDGLTVQQIDRACTPALWCALTREIDFDEKNGLPAREDRVIRVHGQEISSADCIQVFSKRKKTKSDRDEAPFGAIAVRGGFVEIGSSIHHARIYRIEGEKPAYAMLRVFTHDLLSQRHGDLFSAVIPPQSISMRCAATELRQAISEGRATYLGWIVSGDELHIPVETFTTHKIGSFLKDYPNTTRWRICGYDSETMLILKPRILSAEGLNNSSDIAEYVIKNKGWRVAINKLAKVHPTVVRRDALGRPRHSSRSNLPVTWSIE

SEQ ID NO: 54 - protein, 1181 aa, Actinomyces sp.
  Actinomyces sp. oral taxon 180 str. F0310
MLHCIAVIRVPPSEEPGFFETHADSCALCHHGCMTYAANDKAIRYRVGIDVGLRSIGFCAVEVDDEDHPIRILNSVVHVHDAGTGGPGETESLRKRSGVAARARRRGRAEKQRLKKLDVLLEELGWGVSSNELLDSHAPWHIRKRLVSEYIEDETERRQCLSVAMAHIARHRGWRNSFSKVDTLLLEQAPSDRMQGLKERVEDRTGLQFSEEVTQGELVATLLEHDGDVTIRGFVRKGGKATKVHGVLEGKYMQSDLVAELRQICRTQRVSETTFEKLVLSIFHSKEPAPSAARQRERVGLDELQLALDPAAKQPRAERAHPAFQKFKVVATLANMRIREQSAGERSLTSEELNRVARYLLNHTESESPTWDDVARKLEVPRHRLRGSSRASLETGGGLTYPPVDDTTVRVMSAEVDWLADWWDCANDESRGHMIDAISNGCGSEPDDVEDEEVNELISSATAEDMLKLELLAKKLPSGRVAYSLKTLREVTAAILETGDDLSQAITRLYGVDPGWVPTPAPIEAPVGNPSVDRVLKQVARWLKFASKRWGVPQTVNIEHTREGLKSASLLEEERERWERFEARREIRQKEMYKRLGISGPFRRSDQVRYEILDLQDCACLYCGNEINFQTFEVDHIIPRVDASSDSRRTNLAAVCHSCNSAKGGLAFGQWVKRGDCPSGVSLENAIKRVRSWSKDRLGLTEKAMGKRKSEVISRLKTEMPYEEFDGRSMESVAWMAIELKKRIEGYFNSDRPEGCAAVQVNAYSGRLTACARRAAHVDKRVRLIRLKGDDGHHKNRFDRRNHAMDALVIALMTPAIARTIAVREDRREAQQLTRAFESWKNFLGSEERMQDRWESWIGDVEYACDRLNELIDADKIPVTENLRLRNSGKLHADQPESLKKARRGSKRPRPQRYVLGDALPADVINRVTDPGLWTALVRAPGFDSQLGLPADLNRGLKLRGKRISADFPIDYFPTDSPALAVQGGYVGLEFHHARLYRIIGPKEKVKYALLRVCAIDLCGIDCDDLFEVELKPSSISMRTADAKLKEAMGNGSAKQIGWLVLGDEIQIDPTKFPKQSIGKFLKECGPVSSWRVSALDTPSKITLKPRLLSNEPLLKTSRVGGHESDLVVAECVEKIMKKTGWVVEINALCQSGLIRVIRRNALGEVRTSPKSGLPISLNLR

SEQ ID NO: 55 - protein, 1103 aa, Actinomyces sp.
  Actinomyces sp. oral taxon 181 str. F0379
MTKINDDLRYRVGIDVGLKSIGFCAVEVDENDQPLRLLNSMVFVHDAGVDPNENKAAKSRKLTAGVARRTQRGTAQNRRRLAELDRALSEELNWPLPNLEDFEDSYEPWHTRAELVEHYIKDDAERAEALAIAIRHIARHRGWRNPYLSVDSLLTPQEPSKFLRGLNERVTQALGREFPADATPGQLICAYIDSPKYAETQGIRGDSGILSGKLHQFDNVGEIRKICEVQRLDHDVFKLLVRKVFFAKSPRGSAAGLVGHDQIPGQGKYIRAEKAHPDFQLFRIVAVLTNLRIREGKAERCLTPDELRGLVDYILEVQLKQQVTWADLADNLGIERTDLRGTARASFDGSPALRFPPTDVTAEKIMASKVKWLKDWWDKADSERRGFMVDALSNSGGSTGDNDIDDEVAALLEAATEDEQAELEKIQLPQGRAAYSLDSLRRLTKRMLEEGVDLHTARKEEFNVDDDWRPEPEPIEAPVGNPAVDRVLKQVARWLNMATDRWGVPDVINIEHTRDGLGSEKVARELLRESQKRQDLNQKDMDKMIRELGISGKARRSSLIKYQAIQRQNSMCLYCGTEIGFETAEMDHIVPRALSGSTNDRSNLAAVCRACNHQKGAVPFAVWATSGEAHAGVSLEDAIKRVRLWQKGPGMSPKQHKAFQNEVISRLKSRKPDEEFDGRSMESVAWMAVELRTRIDGYYRKVNSDSVPKVGIYRGQLTAEARKASGFENRVNLIGGKGKTRFDRRHHAMDALVIAMMNQSVSQTLALRVNMRESQRITGQEETWKNFYGKPGQASERFEKWREGMLRAVELFNIELAKNAIPFHENVRLRVGSSKVHDDTVRKFIHAKLGEALSVAMIDCAETPALWTALTRLPDFDPKDGLPEDLSREIYIHSRKITADEQLNFFNSPSACLKVRGGYVEIGSSIHHARVYRIDGKKTTYSMVRVFATDLVKMTHEDVFTTPLKPSTISMRTADPKIRKALADGTATQIGWLVEGDELQLETDKYSGGLIGEVLAEYPQLTSWRVAGFYGVTQLRLRPYMLAAEGIPSDASESLRKVIEGKGWLPAINALLSSGCVKVVRRNCLGEPRFNAKSSLPVSQLLR

SEQ ID NO: 56 - protein, 1120 aa, Actinomyces sp.
  Actinomyces sp. oral taxon 848 str. F0332
MNAMKQYNAGIDVGINSVGFAAIEVDSKGLPLNILNNMVVLHDSGVDPGTAKTGATRLANSGTARRTRKLIARRRKRLQKLDRYIEVQGWPLVDFSSLPDPYTPWKIRAKLTQDRLEGEEQGRGLSIALRHMARHRGWRNPYEGVESLHSPKEASKQFKDLKDRVTKVSGVIFDEDATPAEVVCDIGLSPKQRLRSAPSAKYKEGATLADEPVGGKSKEGLLGGKLMQSDNANELRKIGIVQGLSNEKVNEIIDQVFASESPKGQAGKRAKKDELPGQEQYVRALRAHLAFQRFRIVAAVANLRILEAEPKHERLLSQSEKDKVIEFLMSADGDDGVTWSDVAEELGIERECLSGTAKRGADGERPSSFPPTNSTNISIVRSKVKPLIEWWRKASDDEQATLVTALSNADELTDDQPSAETVRQFLSSPDEQSQEKIDKISLPKGRAAYSVNSLERLTRRMLKDSVDLFEARKREFGVDNNWTPTPDSIGEPVGNPAVDRVLKIVNRWLLAVTRKWGPPKVVNIEHVRVGFTSAAQTRKYEEENKTNRERNLAILEELRDKFGTSGKIRREDITRFAALRRQNCQCAYCGEAITFFDCEMDHIVPRKGPGSTNTRNNLVAICERCNKSKSNMPFSLWAQNCDIPGVSVEAVIDRVRTWIKDPELNPKQYNNFKKDVIERLRKTVDDDAIDNRSIESVAWMATELADRIGSHFRTAGANTKVRVYRGWLTSEARKASGFEGKINLIGGRGKTRLDRRHHAMDAATIALMRQSVAQTLVERASIRESDRLRRVVSSSWKDYRGADRDKQFSYGSWLNSMNALAELFNRAIDADGIPVTQNLRLRLGNGEAHDATIRSLEKKRVGASWTIGEIDRASTPQLWLALTRQEDFDQNDGLPANASRELRVKNHWFHAEENVTLFPTKSAAIAVRGGYAEIGNTIHHARLYKLPGKKLTYGMIRVFAIDLLCAWHTDLFSSPLLPESISLRTAETKVRRAVEDGAAMYIGWLVDGDEIVLDPETKAFKSNKIGEYLCEFPGTKRWKVDGFPDKEKLRLRPLQLAGEGLPEDVSAGTEEILGPKGNGWRVAINALFKSSQLVVVRRTALGMVRKLSRRHLPLTTRLRG

SEQ ID NO: 57 - protein, 1114 aa, Actinomyces turicensis
  Actinomyces turicensis ACS-279-V-Col4
MQFHFYMVYVTMKGMNDKDASQQLRYRVGIDVGTHSIGFCAVEVDESGMPIQLLNSMVHKHDSGIDPGGNDTATTRLAEAGVARRTRRLIRRRKKRLQELDAFIEECGWPLVDLATITDARSPWRIRAHLATEHIDDEAEQGKLLSIALRHMARHRGWRSPYARISSLHIQADPSEQLKALAQRVSEKTGISLTADQTPAQLISVYLDVFETGKLRGPEGILGGKLMQSDNANELRRIATVQGLDNDLLKKIIGFVFAAESPKGSAAKRVGKDVLPGAHGLRAEKAHPAFQQFRIVSIVQNLRIKEGTGLRALTSEETEIVVDFLNQAGLTEAPTWEEVADNLEIPRSHLKGTATEGFDGIAPSTRPPFDVTSQKILNGKLKKLSAWWKDADYDHRCAMVNALSNVGSDDEGSLADDDVREFLSDFTDEELEALDKVELPGGRAAYSVDSLEKLTNTMLSEGCDLHSARKIAFGVDDSWTPPAEPIGQPVGNPAVDRVLKQVARWISAATNQWGTPESVNIEHVRDALGSEKASREYQRSLQTRRIRNEKLFAEMRERLDIGGKPRRSELTRYLALQRQNCQCLYCGMPITYTDAEMDHIVPRKGAASTNTRENFAAVCRACNHQKSNLPFAVWAEKTERPGVSVKEAYKRVSDMRIEPGMNGRQMNEFRKAIRLRLTTKHADAEIDGRSLESVAWMANELRHRIEGFYRSAENDVTVRVFRGAVTAEGRRASGFESRVNLIGGKGKTRLDRRHHAMDALTIALMEPGIAQTIALRMNMRESQRVLGEQETWKSFTGGSDTARKRWEHWCEEMLRASELFNVFLAEDRIPICQNKRLRLGSSAVHKAIVQPFEASDKRIVSDAMPVELIDRASTPALWTALTRDPDFDPKEGLPANPSRTIRLHDKRLGPNETVEFFPTAAACLAIRGGYCEIGAGIHHARIFRISGKKTTYAMLRVYQCDLVRFQKENLLTVELPANTISVRTAVPKLREALAHGTAEQIGWLVVGDELKIDLSGFTTGQIETFNETYPQATRWEVTGFPTKTQLRLKPLLIASEGLADDVPDDIVKIVKGPGWWPAIDKLLKIGNVVLYRRDTHGKPRVVSHRSLPLSSKLQ

SEQ ID NO: 58 - protein, 1101 aa, Akkermansia muciniphila
MSRSLTFSFDIGYASIGWAVIASASHDDADPSVCGCGTVLFPKDDCQAFKRREYRRLRRNIRSRRVRIERIGRLLVQAQIITPEMKETSGHPAPFYLASEALKGHRTLAPIELWHVLRWYAHNRGYDNNASWSNSLSEDGGNGEDTERVKHAQDLMDKHGTATMAETICRELKLEEGKADAPMEVSTPAYKNLNTAFPRLIVEKEVRRILELSAPLIPGLTAEIIELIAQHHPLTTEQRGVLLQHGIKLARRYRGSLLFGQLIPRFDNRIISRCPVTWAQVYEAELKKGNSEQSARERAEKLSKVPTANCPEFYEYRMARILCNIRADGEPLSAEIRRELMNQARQEGKLTKASLEKAISSRLGKETETNVSNYFTLHPDSEEALYLNPAVEVLQRSGIGQILSPSVYRIAANRLRRGKSVTPNYLLNLLKSRGESGEALEKKIEKESKKKEADYADTPLKPKYATGRAPYARTVLKKVVEEILDGEDPTRPARGEAHPDGELKAHDGCLYCLLDTDSSVNQHQKERRLDTMTNNHLVRHRMLILDRLLKDLIQDFADGQKDRISRVCVEVGKELTTFSAMDSKKIQRELTLRQKSHTDAVNRLKRKLPGKALSANLIRKCRIAMDMNWTCPFTGATYGDHELENLELEHIVPHSFRQSNALSSLVLTWPGVNRMKGQRTGYDFVEQEQENPVPDKPNLHICSLNNYRELVEKLDDKKGHEDDRRRKKKRKALLMVRGLSHKHQSQNHEAMKEIGMTEGMMTQSSHLMKLACKSIKTSLPDAHIDMIPGAVTAEVRKAWDVFGVFKELCPEAADPDSGKILKENLRSLTHLHHALDACVLGLIPYIIPAHHNGLLRRVLAMRRIPEKLIPQVRPVANQRHYVLNDDGRMMLRDLSASLKENIREQLMEQRVIQHVPADMGGALLKETMQRVLSVDGSGEDAMVSLSKKKDGKKEKNQVKASKLVGVFPEGPSKLKALKAAIEIDGNYGVALDPKPVVIRHIKVFKRIMALKEQNGGKPVRILKKGMLIHLTSSKDPKHAGVWRIESIQDSKGGVKLDLQRAHCAVPKNKTHECNWREVDLISLLKKYQMKRYPTSYTGTPR

SEQ ID NO: 59 - protein, 1113 aa, Alcanivorax pacificus
  Alcanivorax pacificus W11-5
MRYRVGLDLGTASVGAAVFSMDEQGNPMELIWHYERLFSEPLVPDMGQLKPKKAARRLARQQRRQIDRRASRLRRIAIVSRRLGIAPGRNDSGVHGNDVPTLRAMAVNERIELGQLRAVLLRMGKKRGYGGTFKAVRKVGEAGEVASGASRLEEEMVALASVQNKDSVTVGEYLAARVEHGLPSKLKVAANNEYYAPEYALFRQYLGLPAIKGRPDCLPNMYALRHQIEHEFERIWATQSQFHDVMKDHGVKEEIRNAIFFQRPLKSPADKVGRCSLQTNLPRAPRAQIAAQNFRIEKQMADLRWGMGRRAEMLNDHQKAVIRELLNQQKELSFRKIYKELERAGCPGPEGKGLNMDRAALGGRDDLSGNTTLAAWRKLGLEDRWQELDEVTQIQVINFLADLGSPEQLDTDDWSCRFMGKNGRPRNFSDEFVAFMNELRMTDGFDRLSKMGFEGGRSSYSIKALKALTEWMIAPHWRETPETHRVDEEAAIRECYPESLATPAQGGRQSKLEPPPLTGNEVVDVALRQVRHTINMMIDDLGSVPAQIVVEMAREMKGGVTRRNDIEKQNKRFASERKKAAQSIEENGKTPTPARILRYQLWIEQGHQCPYCESNISLEQALSGAYTNFEHILPRTLTQIGRKRSELVLAHRECNDEKGNRTPYQAFGHDDRRWRIVEQRANALPKKSSRKTRLLLLKDFEGEALTDESIDEFADRQLHESSWLAKVTTQWLSSLGSDVYVSRGSLTAELRRRWGLDTVIPQVRFESGMPVVDEEGAEITPEEFEKFRLQWEGHRVTREMRTDRRPDKRIDHRHHLVDAIVTALTSRSLYQQYAKAWKVADEKQRHGRVDVKVELPMPILTIRDIALEAVRSVRISHKPDRYPDGRFFEATAYGIAQRLDERSGEKVDWLVSRKSLTDLAPEKKSIDVDKVRANISRIVGEAIRLHISNIFEKRVSKGMTPQQALREPIEFQGNILRKVRCFYSKADDCVRIEHSSRRGHHYKMLLNDGFAYMEVPCKEGILYGVPNLVRPSEAVGIKRAPESGDFIRFYKGDTVKNIKTGRVYTIKQILGDGGGKLILTPVTETKPADLLSAKWGRLKVGGRNIHLLRLCAE

SEQ ID NO: 60 - protein, 1029 aa, Alicycliphilus denitrificans
  Alicycliphilus denitrificans BC
MRSLRYRLALDLGSTSLGWALFRLDACNRPTAVIKAGVRIFSDGRNPKDGSSLAVTRRAARAMRRRRDRLLKRKTRMQAKLVEHGFFPADAGKRKALEQLNPYALRAKGLQEALLPGEFARALFHINQRRGFKSNRKTDKKDNDSGVLKKAIGQLRQQMAEQGSRTVGEYLWTRLQQGQGVRARYREKPYTTEEGKKRIDKSYDLYIDRAMIEQEFDALWAAQAAFNPTLFHEAARADLKDTLLHQRPLRPVKPGRCTLLPEEERAPLALPSTQRFRIHQEVNHLRLLDENLREVALTLAQRDAVVTALETKAKLSFEQIRKLLKLSGSVQFNLEDAKRTELKGNATSAALARKELFGAAWSGFDEALQDEIVWQLVTEEGEGALIAWLQTHTGVDEARAQAIVDVSLPEGYGNLSRKALARIVPALRAAVITYDKAVQAAGFDHHSQLGFEYDASEVEDLVHPETGEIRSVFKQLPYYGKALQRHVAFGSGKPEDPDEKRYGKIANPTVHIGLNQVRMVVNALIRRYGRPTEVVIELARDLKQSREQKVEAQRRQADNQRRNARIRRSIAEVLGIGEERVRGSDIQKWICWEELSFDAADRRCPYSGVQISAAMLLSDEVEVEHILPFSKTLDDSLNNRTVAMRQANRIKRNRTPWDARAEFEAQGWSYEDILQRAERMPLRKRYRFAPDGYERWLGDDKDFLARALNDTRYLSRVAAEYLRLVCPGTRVIPGQLTALLRGKFGLNDVLGLDGEKNRNDHRHHAVDACVIGVTDQGLMQRFATASAQARGDGLTRLVDGMPMPWPTYRDHVERAVRHIWVSHRPDHGFEGAMMEETSYGIRKDGSIKQRRKADGSAGREISNLIRIHEATQPLRHGVSADGQPLAYKGYVGGSNYCIEITVNDKGKWEGEVISTFRAYGVVRAGGMGRLRNPHEGQNGRKLIMRLVIGDSVRLEVDGAERTMRIVKISGSNGQIFMAPIHEANVDARNTDKQDAFTYTSKYAGSLQKAKTRRVTISPIGEVRDPGFKG

SEQ ID NO: 61 - protein, 1029 aa, Alicycliphilus sp.; identical to SEQ ID NO: 60

SEQ ID NO: 62 - protein, 1146 aa, Alicyclobacillus hesperidum
  Alicyclobacillus hesperidum URH17-3-68
MAYRLGLDIGITSVGWAVVALEKDESGLKPVRIQDLGVRIFDKAEDSKTGASLALPRREARSARRRTRRRRHRLWRVKRLLEQHGILSMEQIEALYAQRTSSPDVYALRVAGLDRCLIAEEIARVLIHIAHRRGFQSNRKSEIKDSDAGKLLKAVQENENLMQSKGYRTVAEMLVSEATKTDAEGKLVHGKKHGYVSNVRNKAGEYRHTVSRQAIVDEVRKIFAAQRALGNDVMSEELEDSYLKILCSQRNFDDGPGGDSPYGHGSVSPDGVRQSIYERMVGSCTFETGEKRAPRSSYSFERFQLLTKVVNLRIYRQQEDGGRYPCELTQTERARVIDCAYEQTKITYGKLRKLLDMKDTESFAGLTYGLNRSRNKTEDTVFVEMKFYHEVRKALQRAGVFIQDLSIETLDQIGWILSVWKSDDNRRKKLSTLGLSDNVIEELLPLNGSKFGHLSLKAIRKILPFLEDGYSYDVACELAGYQFQGKTEYVKQRLLPPLGEGEVTNPVVRRALSQAIKVVNAVIRKHGSPESIHIELARELSKNLDERRKIEKAQKENQKNNEQIKDEIREILGSAHVTGRDIVKYKLFKQQQEFCMYSGEKLDVTRLFEPGYAEVDHIIPYGISFDDSYDNKVLVKTEQNRQKGNRTPLEYLRDKPEQKAKFIALVESIPLSQKKKNHLLMDKRAIDLEQEGFRERNLSDTRYITRALMNHIQAWLLFDETASTRSKRVVCVNGAVTAYMRARWGLTKDRDAGDKHHAADAVVVACIGDSLIQRVTKYDKFKRNALADRNRYVQQVSKSEGITQYVDKETGEVFTWESFDERKFLPNEPLEPWPFFRDELLARLSDDPSKNIRAIGLLTYSETEQIDPIFVSRMPTRKVTGAAHKETIRSPRIVKVDDNKGTEIQVVVSKVALTELKLTKDGEIKDYFRPEDDPRLYNTLRERLVQFGGDAKAAFKEPVYKISKDGSVRTPVRKVKIQEKLTLGVPVHGGRGIAENGGMVRIDVFAKGGKYYFVPIYVADVLKRELPNRLATAHKPYSEWRVVDDSYQFKFSLYPNDAVMIKPSREVDITYKDRKEPVGCRIMYFVSANIASASISLRTHDNSGELEGLGIQGLEVFEKYVVGPLGDTHPVYKERRMPFRVERKMN

SEQ ID NO: 63 - protein, 1052 aa, Aminomonas paucivorans
  Aminomonas paucivorans DSM 12260
MIGEHVRGGCLFDDHWTPNWGAFRLPNTVRTFTKAENPKDGSSLAEPRRQARGLRRRLRRKTQRLEDLRRLLAKEGVLSLSDLETLFRETPAKDPYQLRAEGLDRPLSFPEWVRVLYHITKHRGFQSNRRNPVEDGQERSRQEEEGKLLSGVGENERLLREGGYRTAGEMLARDPKFQDHRRNRAGDYSHTLSRSLLLEEARRLFQSQRTLGNPHASSNLEEAFLHLVAFQNPFASGEDIRNKAGHCSLEPDQIRAPRRSASAETFMLLQKTGNLRLIHRRTGEERPLTDKEREQIHLLAWKQEKVTHKTLRRHLEIPEEWLFTGLPYHRSGDKAEEKLFVHLAGIHEIRKALDKGPDPAVWDTLRSRRDLLDSIADTLTFYKNEDEILPRLESLGLSPENARALAPLSFSGTAHLSLSALGKLLPHLEEGKSYTQARADAGYAAPPPDRHPKLPPLEEADWRNPVVFRALTQTRKVVNALVRRYGPPWCIHLETARELSQPAKVRRRIETEQQANEKKKQQAEREFLDIVGTAPGPGDLLKMRLWREQGGFCPYCEEYLNPTRLAEPGYAEMDHILPYSRSLDNGWHNRVLVHGKDNRDKGNRTPFEAFGGDTARWDRLVAWVQASHLSAPKKRNLLREDFGEEAERELKDRNLTDTRFITKTAATLLRDRLTFHPEAPKDPVMTLNGRLTAFLRKQWGLHKNRKNGDLHHALDAAVLAVASRSFVYRLSSHNAAWGELPRGREAENGFSLPYPAFRSEVLARLCPTREEILLRLDQGGVGYDEAFRNGLRPVFVSRAPSRRLRGKAHMETLRSPKWKDHPEGPRTASRIPLKDLNLEKLERMVGKDRDRKLYEALRERLAAFGGNGKKAFVAPFRKPCRSGEGPLVRSLRIFDSGYSGVELRDGGEVYAVADHESMVRVDVYAKKNRFYLVPVYVADVARGIVKNRAIVAHKSEEEWDLVDGSFDFRFSLFPGDLVEIEKKDGAYLGYYKSCHRGDGRLLLDRHDRMPRESDCGTFYVSTRKDVLSMSKYQVDPLGEIRLVGSEKPPFVL

SEQ ID NO: 64 - protein, 1361 aa, Anaerococcus tetradius
  Anaerococcus tetradius ATCC 35098
MGNYYLGLDIGTNSVGWAVTDENYNIERFKKKNMWGIRLFDEAKTAESRRIHRQARRMRQRKIQRLNLLMELFDVEISKVDESFFIRKKESDLHYEDKSQDSRYALFNDKEFNDKDYHNKYPTIFHLIMDLIENDEKKDIRLLYLACHYLIKNRGHFIFEGQKFDVNSSLNNNINKLKSHLDQFYNICLDFDNDKLIEILVNQNLNISEKSKKIKELLRKTNLEVGIANLIAGGSIKLSNMFDDDELKNLDYNSLSFKNSNFDEGRELFEEVLEDRFELVEILKDIHDASVLETMLSSASISPDGGKYISSSMINSYNKHKRDLKLLKKIIKKYKKSEYDNIFRDENIKNNYLSYTRTGINKNKKVQAEDNTDSDGFYKYIVKILKDIKENDSDEDIKYILSEIDKKNFVPKQRTKENSVIPYQLREIELRKIIDNQSKYHKFLNEVDEKGISVKEKIISLLTFRIPYYIGPLNPSYNEEKNFTTSWVKRLAKGKVTPWNFEDMVDIDASREAFIENKLNKCSFLLDETVLPKDSLLYQEYMVLNELNNLKINGQSINTDLKKSIYEELFKKYKKVTRKRLISYIKEKENMSGDIVITGIDGDFKQGLKSYIAFKDIIGEKIDDDIYRKEVEKIIRDISLYGDDKSFIQKKIKNENKLDLSDDQISKIAKLKFKDWGRFSKKLLVGIKASDKNTGEIDNIIGFMRNYNYNIMQLMANVFTFKDEIEKLNSKYYTDEKINIDYLDDLYLSSPAKRMLWQSFQIVDEIKNIKNSDPKKIFIEMARSKEDKPTRKMSRKSRLEKLYTDSKKQFIKLFGPDEYDKLNNEIKNKSESDFRWDNLYLYYTQFGRCMYSLDPIDLEELSNKNLYDQDHIYPKSKIYDDSIENRVLVKKQLNLDKSNEYPIPDRVLNKDKNKLLAFWKMLNEKELIGDKKYARLIRKSPFTDEELGDFIARQLVETRQATKETANMLKRLCPDSKIVYVKAKNVSDFRRKFDILKCRSINDLHHAHDAYLNIVVGNVFDTKFTSNPLNFIKNNSKNRSYNLEKIYDYDVIRNEKIAWLAERKEENQDGSIATVLKNLSKNDIRVTRRTYIKCEDLFDENIVRKGNGKFPIKENNNKSDTNKYGGYSGIKNAYFVLLEDEKHNRILEAIPSFIYKKEKNGEKGSVINYLQNILGIKSAKILRDKIKIGSLLKIDKFPYNLAGKSGNGILISGGVQLILDKNTSKYIKKIENYKYKLDENKDYQINIFDKLSKEENIKLFDLFVDKFENSIYKNRVNIKLKEIKLARPKFEHLSIEEQIKTLTQMLILFGRENNAVNLEYIGLPKNTGKTKINKKINNKDIKIINQSITGLYETEEDLANI

SEQ ID NO: 65 - protein, 1552 aa, Anaerophaga sp.
  Anaerophaga sp. HS1
MFSQRNNPYCELLQNVKQLYKEKFGKTNQVDNSIIYGFMKRILGLDLGTNSIGWALVENDENDRKGKIIGMGSRIIPMDMSELDNFNKGASISKTAERTRLRMTRRLRERHLLRRARLHRILNIMGFLPEHYRNSIDFIDKKGCFFEGQEPKIAYKPDKNSEQFCFLFTSSFHEMLEDFRKFQPELIQNRKKVPYDWTIYYLRKKALTQKISKEELAWIILNFNTKRGYYHLRGEDEDNQDNKKIKEFRALKVVNVTEREGANSSGKKWYDMELENGWVYSRQSNLPPNLEGKTIELIVSYTLDNNGNIKKDKNGKEKYSLSMPGEEDWNLVKIKTENDLKTSKKSVGEYIYDHLLKNPDQKIRGKLISTIERKFYKEELSRILKTQMNFYEELKNRELYQKCVEELYPNNKSHQQTLLQKDFIHLIVEDIIFYQRPLKSKRAFVNNCPLEYRVYVDKKSGELIKSGVKCIPKSHPLFQEFRLWQYVRNLRIYERERMVNGRLMVNVDVTNELLPDEEHIVRLFDLLNDRKSFKQDDVLRFVGIKSPKDRKRYSWNYPEDKELPGNETRHLILAWLKKVDGVPEDWLDPEKLKALWHLLYSVTDREEIIKGLHSFAKKYELPDTFVEHFKKIPRLEREYGSFSEKAIKKLLPLMRMGKYWKAEEIPADLLEKAQKIIDAEADDRISDEVREKLLHLKDISQLKGLPLWQASYLVYGRHSETGEVVKWRTSEDLEKYILQFKQHSLRNPVVEQVILEALRVVKDIWEHYGEGKEGFFNEIHVEIGRELKNPADKRKKITSQIQENENTNLRIKALLEELFNDPSVKNVRPYSPAQQEILRIYEDGVLNGQKEIPDDILKISKMARPSKSQLVKYKLWLEQKYRSPYTGEIIPLSQLFTSAYEIEHIIPQARYFDDSFSNKVICEAEVNREKGHQLAFEFITKRGGDEIELNFGKKVTILNVEEYQKFVKDHYGRSLRSLSKMRKLLMEDIPDDFIDRQLNDSRYISKVVRNLLSNIVRAEDENSLVSKHLITCTGGVTTRLKHEWGLNDVWNELITPRFVRLNKMGKEKFGEWINKKGKQVFQIQMPLELQKGFNKKRIDHRHHALDALVVACASRSHVNYLNNDSARANASETRYDLRNKLCYKDKTDSNGNYRWKFYKPWESFTEEAKNRLAGTVVSFKSNRRIMTRSSNRYFKWVDTSEGKKKKLVRQIKGDNQAIRKPLHKDTVLGKVSLRKEKKVSLSKAIDLWESIVDKPLKKRIQSLREQGYDKKLLLKYFKDRNNQFNGQDISRVNIYFFDNNLAARRVTLDASFNSEKRIDGITDSGIKKILYAHLQNEKYHGKKDEKGNEISPYELAFSPEGLEEMNANIKKLNGGKPHCPIYKVRLAETIGEKFKLGEKGNKNKKYVEAAKGTNLFFAVYVDEKGVRSFETIPFSVALERRKQKLAVVPEENENKEKLLFYLSPNDLVYVPDEDEKLIDYRQLSINPTRIYKMVSSSGTQCFFIPHFVASPIVQTMELGPNNKSERAWDGQMIKNVCYKLSVDRLGNVKIEK

SEQ ID NO: 66 - protein, 1515 aa, Anaerophaga thermohalophila
  Anaerophaga thermohalophila DSM 12881
MKRILGLDLGTNSIGWALVESDEEQKSGKIQGIGSRIIPMDQNELDNFNKGNTVSQTAERTRLRMVRRLRERHLLRRERLHRVLKEIGFLPEHYLEQIDFTEKPGGFLPGKEPKIAYKPDNFKDKYDFLFQDSYHEMLSDFQDKNPEFIQKRKKVPQDWTIYYLRKKALTAKITKEELAWIILNFNQKRGYYQLRGEDEDVAKNTKKEEFHALKVVKVKEREDSEGASGKWYDIELENGWVYPRQSNIRPDWEGKILELIVTYNLDKDGNIKTDKEGNEKRSFRMPNKDDWTLRKKRTENEIEKSGKTVGEYIYDNLLDAPDLKIRGKLVSTIERKYYRSELEQILTAQKKYHPELSNSELFNKCISNLYPNNDIHRKALLSKDFVHLIINDIIFYQRPLKSKRSTVSNCPLEYRVYVDKVTGEKKKVPLKCIPKSHPLYQEFRLWQYVKNLRLFEKERFENGRLLTNVDVTEQFLPDEDKYVELFEFLNGRKTFKQDDILKFAGIKSAKDRVKYYWNYPQEKEYPGNETRYLIESRLKKIENVPDEWLNYEKIEELWHLLYSVTDKVEIEKGLQSFAAKYQLPDLFVEVFKGFPRMEREYGAFSKKAIKKLLPLMRMGKYWKLENINPDLIEKVQKIIDGEADDNINDGIRERFSEINEMSDLRGMPLWKASYLVYGRHSEAAEVIRWRTSADLDQYIKDFKQHALRNPIVEQVVLEALRVVKDVWNYFGEGREKFFDEIHVEIGRDLKNPADKRQKIANQIQENENTNLRIKALLVELFNDPEVQNVRPYSPVQQQLLKIYEDGVLNAERDIPDDIQKISRMANPTRNQLIRYKLWLEQKYRSPYTGEIIPLNKLFTSEYEVEHIIPRARYFDDSFSNKIISEAEVNRKKDRMLAFEFIKKLGGSTIDLNYGKKVSVLTVEEYQQFVKDHYGINPHSRLKMQKLLMDEIPESFIERQLNDSRYISKMVRNLLSNIVREENENSPVAKQLITCSGSITNTLKQEWGLNDVWNTIITPRFERLNKMGEQKYGEWVNKEGKPVFQIQMPLELQKGFNKKRIDHRHHALDALIVASATRSHVNYLSNEAAKTNAKDTRFDLRNRLCYKEKRGQNRNFTWRFYKPWNTFTEDAKNALNDIVVSFKSNHRVINKSTNRYFKWENLPGGMKKKRLVRQEKGDNWAIRQSLHKDTVLGKVSLRKVKPVSLSVALDSWNNIVDKALKKKIRSLKDQGYDKKLMLKYFKDRRNEYNGENISRVNVYYFDEEMAARRVDLDTSFNSEKRIEGITDSGIKKIIYAHLKNEKYHGQKDDKGKDISPYELAFSPEGIAEMNANIKQLNGGKPHCPIYKVRLAEPVGEKFQLGETGNKTEKLVEVAKGTNLFFGVYANDEGVRSFATVPFYLAVEREKQGLPAVPQENENGDQLLFWLSPNDLVYVPSEEDAHFANPKQIELDNSRIYKMVSSTGTQCFFIPHFVATPIVQTIELGPNNKSERAWDGQMIKKVCYKLSVDRLGNVEIE

SEQ ID NO: 67 - protein, 1168 aa, Azospirillum lipoferum
MARPAFRAPRREHVNGWTPDPHRISKPFFILVSWHLLSRVVIDSSSGCFPGTSRDHTDKFAEWECAVQPYRLSFDLGTNSIGWGLLNLDRQGKPREIRALGSRIFSDGRDPQDKASLAVARRLARQMRRRRDRYLTRRTRLMGALVRFGLMPADPAARKRLEVAVDPYLARERATRERLEPFEIGRALFHLNQRRGYKPVRTATKPDEEAGKVKEAVERLEAAIAAAGAPTLGAWFAWRKTRGETLRARLAGKGKEAAYPFYPARRMLEAEFDTLWAEQARHHPDLLTAEAREILRHRIFHQRPLKPPPVGRCTLYPDDGRAPRALPSAQRLRLFQELASLRVIHLDLSERPLTPAERDRIVAFVQGRPPKAGRKPGKVQKSVPFEKLRGLLELPPGTGFSLESDKRPELLGDETGARIAPAFGPGWTALPLEEQDALVELLLTEAEPERAIAALTARWALDEATAAKLAGATLPDFHGRYGRRAVAELLPVLERETRGDPDGRVRPIRLDEAVKLLRGGKDHSDFSREGALLDALPYYGAVLERHVAFGTGNPADPEEKRVGRVANPTVHIALNQLRHLVNAILARHGRPEEIVIELARDLKRSAEDRRREDKRQADNQKRNEERKRLILSLGERPTPRNLLKLRLWEEQGPVENRRCPYSGETISMRMLLSEQVDIDHILPFSVSLDDSAANKVVCLREANRIKRNRSPWEAFGHDSERWAGILARAEALPKNKRWRFAPDALEKLEGEGGLRARHLNDTRHLSRLAVEYLRCVCPKVRVSPGRLTALLRRRWGIDAILAEADGPPPEVPAETLDPSPAEKNRADHRHHALDAVVIGCIDRSMVQRVQLAAASAEREAAAREDNIRRVLEGFKEEPWDGFRAELERRARTIVVSHRPEHGIGGALHKETAYGPVDPPEEGFNLVVRKPIDGLSKDEINSVRDPRLRRALIDRLAIRRRDANDPATALAKAAEDLAAQPASRGIRRVRVLKKESNPIRVEHGGNPSGPRSGGPFHKLLLAGEVHHVDVALRADGRRWVGHWVTLFEAHGGRGADGAAAPPRLGDGERFLMRLHKGDCLKLEHKGRVRVMQVVKLEPSSNSVVVVEPHQVKTDRSKHVKISCDQLRARGARRVTVDPLGRVRVHAPGARVGIGGDAGRTAMEPAEDIS

SEQ ID NO: 68 - protein, 1068 aa, Bacillus cereus
  Bacillus cereus BAG4X12-1
MRYVLGLDIGIASCGWAVINQEKERIEDLGVRIFDKAENPKDGKSLAAPRRDARSTRRTLRRKKHRMQRIKILLVKQGLLFKTELNHLYESATEFDVWNLRLDALERKLHPKEFARVLIHLAKRRGFKSNRKETTLSENGQILESISENQQIMEQQNYRTVGEMILKDKKFENHKRNKDGTYIGTVTRQQLQDEIQMIFHTQRLYKNDYATEEFESSYLEIWASQRPYASKDQIEKMIGYCTLEPKEKRTPKASWSFQYFVALQTINNLRLISKDKIEELSFEEKKQIMNLALEKPIVKYIDIRKLLSIPNDFQFNSLSYSADTVDTTLENKRCIELKEYHSINKVYKQVYGKNTPNLLPIDYDTIAYGLTIFKDDKDILEYLQNKYVNAKGKPIKNLAKKTYDDTFIQALLNLNFTKMGHLSFKALKNIIPFLEEGLSYDKACEKAGYNFKGTSYTERTKYLPVIPQNTNPVVHRALSQTRKVINAIIKKYGSPNAIHIETARELSKTFQERKEIDSRYQDNSKKNEHAIHKLKELGNINPSGINIVKFKLWSEQDGRCMYSGKYIEPHRLFEEGYTEVDHILPYSRSLDDSYNNKILTLGTENQRKGNKTPYEYMGNTSIWDEFETRVQSNKKINFKKQQKLLLQNFSYAREQEFIERNLNDTRYATIYLTSLIQQHLIFSESSSKKKVRTVSGIITSHLRSRWGFNKDRKEGHIHHALDAVIVAVTSNHMIQRVTKYYKLKELNKNLQAKQLPFPEPWEGFRLELEARISPNTQQYLKGIHFKNYADVNLSDIKPIFVSRMPKRSITGELHQETIRKFLGYNEKGKVLTAIKTKLEDIPFDANGDFPMYGKETDLYTYNAIKERYLSHEKDKRKSFQEPLYKPTKSGEIGPLIKSIKIMDTRTIVNPVNQGKGVVYNSKIARTDVFKKEDKYYLIPIYTIDLLKNILPHKAITAGKGYEDWTTIDSSFTFLFSLFPNDLIQIVPSKNKTIKARTTVSKKEILLPSLTGYFKGVHSGTAGITVETHDGSVIANVGSKQLLLFEKYQVDVLGHYTKIKEEKRMGMAI

SEQ ID NO: 69 - protein, 1078 aa, Bacillus cereus
  Bacillus cereus BAG4X2-1
MRYVLGLDIGIASCGWAVINQEKERIEDLGVRIFDKAENPKDGKSLAAPRRDARSTRRTLRRKKHRMQRIKVLLVKHGLLSKTELDHLYESATEVDVWNLRLDALERKLYPKEFARILIHLAKRRGFKSNRKETTLSENGQILESISENQQIMEKQNYRTVGEMILKDKKFENHKRNKNGTYVGTVTRQQLQDEIQMIFHAQRLYKNDYATEEFESSYLEIWASQRPYASKDQIEKMIGYCTLEPKEKRAPKASWSFQYFVALQTINNLRLISKDRIEELSFEEKKQIMNLALEKSIVKYIDIRKLLSVPNEFQFNSLSYSADTVDTAVESRKCIELKEYHSINKVYKQIYGENALNLLPKYYDTIAYGLTIFKDDKDILEYLQNKYVNAKGKPISNFANKTYDDTFIQALLNLNFTKMGHLSFKALKNIIPFLEEGLSYDKACEKAGYNFKGTSYTEQTKYLPVIPQNTNPVVHRALSQTRKVINAIIKKYGSPNAIHIETARELSKTFQERKEIDSMYQDNSKKNEHAIHKLKELGNINPSGINIVKFKLWNEQDGRCMYSGKYIEPHRLFEEGYTEVDHILPYSRSLDDSYNNKTLTLGTENQRKGNKIPYEYMGNTSIWNDFETRVQSNKKINKKKQQKLLLQHFSYAREQEFIERNLNDTRYATIYLSSLIQQHLIFSESSRKKKVHTVSGIITSHLRSRWGFNKDRKEGHIHHALDAVIVAVTSDHMIQRVTKYYKLKELNRNLQAKRMPFPEPWEGFRLELEARISPNTQQYLKGLRFKNYADVNLSEIKSIFVSRMPKHSITGELHQETIRKFIGYNEKGKVLTAIKTKLEDIPFDANGDFPMYGKESDLYTYNAIKERYLSHKKDKRKSFQEPLYKPTKSGGIGPLIKSIKIMDTRTIVNPVNQGKGVVYNSKIARTDVFKKEEKYYLIPIYTIDLMKNILPQKAITAGKGYEDWTTIDPSFTFLFSLFPNDLIQIVPSKNKTIKARTTVSKKEVLLPSLTGYFKGVHSGTAGITVETHDGSVIANVGSKQLLLIEKYQVDVLGNYTKIKEEKRIGLTTYNDNKKIAAC

SEQ ID NO: 70 - protein, 1069 aa, Bacillus cereus
  Bacillus cereus Rock1-15
MNYDIGLRIGITSCGWSIINKDLERIEDLGVRVFEKAENPDGTASAAPRREARKSRRKHRRKKHRIERIKRLIVQHDLLSKKELDSLYLSPFNIDVWNLQVEALERKLDNREFARVLIHLVQRRGFQTIRKSVEIQEEGKLLENVSENERIMKVNGYKTVGEMFSKHEKFTHHKRNKDGSYTSVVTRSLLLKEIKTIFNSQRILGNVFSTQKLESDYLYIWGSQRPTLTYEQLMSMVGNCIYEKKEKRAPKTSWAFQYFSLLQKINKLKVSDDNTLRKLSKEERDIVIELAFKKKNVSFVDIRKALKLNDNTKFNHLTYSHVVETKKVEKATFIELKGYHLIKKQLKDRNVELTQELQPKDYDAIAAASTFFKNDIEFRDYLRNQYLDSNGKRKSNIANKVFEDKVIAAVFELNFSKVCHLSFKSLYKLIPHLEKGLDYKEAILCAGYNFRDENKRDKKLFLPVIQQETNPVVHRALTQARKVINAIIREYGSPNTIRFVVANDLAKTYKQRKELESTLKKNRAENEKIKTKLLSMGIINPTGMDIVKYKLWYEQSGICLYTGRQMELSSLFKPGYSIVNHIIPYNRSFDDTYHNRVLTLTETKYEKGNKIPFEYFGAEETCWNEYEKRVSTSKKIHDKKREKLLIRNFDIEYENEMISNNVFDTHYIGSYFEKYIDEHLQFKKSTKKQKVFSIHGNMVAHLHSRWGFNKNSREIYLNHAVDAAIVAVLTDQLIRNIADYYRRDNILEQKGSLKFPEPWKSFSIELEARISPQVRDLIKKLNLDSYLDVDILHIKPVFISKKPRRKVNGEAHKSTIRSLIGINEIGKTVTCIKTRLEDIPFDENGDFPMYGKDTDKYTYTAIKERYLEFNKDKEKAFSTPLYKLKRNGEPGNQIKSVKIIDTRNIVNKVNQGKGIAYNSNIIRVDVFSRDQKYYVVPIYLRDFIKGSLPNKIITAAKGFMQWPETDNSYTFLFSIFPNDLIKVVPKEGKFIKAKNENKENINLTEILGYFKGLDSSTGAFTLESHDGSLLARGIGTKNLLLIEKYQVDVLGRYNKVGNEERQDIKIQQN

SEQ ID NO: 71 - protein, 1088 aa, Bacillus smithii
  Bacillus smithii 7_3_47FAA
MNYKMGLDIGIASVGWAVINLDLKRIEDLGVRIFDKAEHPQNGESLALPRRIARSARRRLRRRKHRLERIRRLLVSENVLTKEEMNLLFKQKKQIDVWQLRVDALERKLNNDELARVLLHLAKRRGFKSNRKSERNSKESSEFLKNIEENQSILAQYRSVGEMIVKDSKFAYHKRNKLDSYSNMIARDDLEREIKLIFEKQREFNNPVCTERLEEKYLNIWSSQRPFASKEDIEKKVGFCTFEPKEKRAPKATYTFQSFIVWEHINKLRLVSPDETRALTEIERNLLYKQAFSKNKMTYYDIRKLLNLSDDIHFKGLLYDPKSSLKQIENIRFLELDSYHKIRKCIENVYGKDGIRMFNETDIDTFGYALTIFKDDEDIVAYLQNEYITKNGKRVSNLANKVYDKSLIDELLNLSFSKFAHLSMKAIRNILPYMEQGEIYSKACELAGYNFTGPKKKEKALLLPVIPNIANPVVMRALTQSRKVVNAIIKKYGSPVSIHIELARDLSHSFDERKKIQKDQTENRKKNETAIKQLIEYELTKNPTGLDIVKFKLWSEQQGRCMYSLKPIELERLLEPGYVEVDHILPYSRSLDDSYANKVLVLTKENREKGNHTPVEYLGLGSERWKKFEKFVLANKQFSKKKKQNLLRLRYEETEEKEFKERNLNDTRYISKFFANFIKEHLKFADGDGGQKVYTINGKITAHLRSRWDFNKNREESDLHHAVDAVIVACATQGMIKKITEFYKAREQNKESAKKKEPIFPQPWPHFADELKARLSKFPQESIEAFALGNYDRKKLESLRPVFVSRMPKRSVTGAAHQETLRRCVGIDEQSGKIQTAVKTKLSDIKLDKDGHFPMYQKESDPRTYEAIRQRLLEHNNDPKKAFQEPLYKPKKNGEPGPVIRTVKIIDTKNKVVHLDGSKTVAYNSNIVRTDVFEKDGKYYCVPVYTMDIMKGTLPNKAIEANKPYSEWKEMTEEYTFQFSLFPNDLVRIVLPREKTIKTSTNEEIIIKDIFAYYKTIDSATGGLELISHDRNFSLRGVGSKTLKRFEKYQVDVLGNIHKVKGEKRVGLAAPTNQKKGKTVDSLQSVSD

SEQ ID NO: 72 - protein, 1069 aa, Bacillus thuringiensis
MNYDIGLRIGITSCGWSIINKDLERIEDLGVRVFEKAENPDGTASAAPRREARKSRRKHRRKKHRIERIKRLIVQHDLLSKKELDSLYLSPFNIDVWNLRVEALERKLDNREFARVLIHLVQRRGFQTIRKSVEIQEEGKLLENVSENERIMKVNGYKTVGEMFSKHEKFTHHKRNKDGSYTSVVTRSLLLKEIKTIFNSQRILGNVFSTQKLESDYLYIWGSQRPTLTYEQLMSMVGNCIYEKKEKRAPKTSWAFQYFSLLQKINKLKVSDDNTLRKLSKEERDIVIELAFKKKNVSFVDIRKALKLNDNTKFNHLTYSHVVETKKVEKATFIELKGYHLIKKQLKDRNVELTQELQPKDYDAIAAASTFFKNDIEFRDYLRNQYLDSNGKRKSNIANKVFEDKVIAAVFELNFSKVCHLSFKSLYKLIPHLEKGLDYKEAILCAGYNFRDENKRDKKLFLPVIQQETNPVVHRALTQARKVINAIIREYGSPNTIRFVVANDLAKTYKQRKELESTLKKNRAENEKIKTKLLSMGIINPTGMDIVKYKLWYEQSGICLYTGRQMELSSLFKPGYSIVNHIIPYNRSFDDTYHNRVLTLTETKYEKGNKIPFEYFGAEETCWNEYEKRVSTSKKIHDKKREKLLIRNFDIEYENEMISNNVFDTHYIGSYFEKYIDEHLQFKKSTKKQKVFSIHGNMVAHLHSRWGFNKNSREIYLNHAVDAAIVAVLTDQLIRNIADYYRRDNILEQKGSLKFPEPWKSFSIELEARISPQVRDLIKKLNLDSYLDVDILHIKPVFISKKPRRKVNGEAHKSTIRSLIGINEIGKTVTCIKTRLEDIPFDENGDFPMYGKDTDKYTYTAIKERYLEFNKDKEKAFSTPLYKLKRNGEPGNQIKSVKIIDTRNIVNKVNQGKGIAYNSNIIRVDVFSRDQKYYVVPIYLRDFIKGSLPNKIITAAKGFMQWPETDNSYTFLFSIFPNDLIKVVPKEGKFIKAKNENKENINLTEILGYFKGLDSSTGAFTLESHDGSLLARGIGTKNLLLIEKYQVDVLGRYNKVGNEERQDIKIQQN

SEQ ID NO: 73 - protein, 1509 aa, Bacteroides coprophilus
  Bacteroides coprophilus DSM 18228
MKKTLGLDLGTNSIGWAVINSNIDSEGKEKLVGISSCGSRIIPMDATTLGDFGKGNTKSPVAERTRLRGIRRLLERSLLRRERLHRVLSVMGFLPEHYASQLDRYGKFLPETEPKLAWYKDDSGRYQFLFQKSFHEMLEDFRQHQPELVAGEKKIPYDWTIYYLRKKALSQEITKEELAWILLNFNQKRGYYQLRGEEEQEENNKSVEYHALKVVSVEDSGERKGKDIWYNVTLENGWVYRRASNIPLDWTGKVKEFVVTTELDDAGNPKKDKEGNVKRSFRAPKEDDWGLLKTRTQAQIDESGKTVGTYIYESLLCMPNQKIRGKLVRTIERKYYKDELRQILVKQSEFHAALQDHNLLLSCIEELYPNNEAHRRLLSASSFIYFLIEDILFYQRPLKSQKGLIDNCPYESHIYKDKKDGSLHHVPLKCVSKSHPLFQEFRLWQFLSNLRIYQRERMMDGSLKLDVDVTREFLPSEEDYVKLFDWLNERKEISQKFLLAYKPFGLKKNEQANYRWNYVEDKSYPCNETRAEIKSRLSKAGVPEEFLTEEKEEALWHILYSISDKKELTKALGTFAAKNCLNESFVEVFAKIPPFESNYAAYSLKAIRKLLALMRMGKYWNEQAIDRQTRDRIEKILTGEYDETIRSRVREKAMLLTDISSFRGLPLWLACYIVYDRHSESKELVKWETPADIDHFLSKFKQNSLRNPIVEQVITESLRTVRDIWKQEGKIDEIHVELGREMKNPAKERARITAQVQENENTNLRIKALLAEFMNPEFEIENVHPYSPGQQEILRIYEDGVLSGIAEKDLPDDITAILKKFRENDVKKRPTTSEVLRYKLWLEQRYRSPYTGRVIPLGKLFTPAYEIEHVIPQSRYFDDSISNKVICESAVNKLKDNCLGYEFIKKHSGEMVELGNGETVPVFSVEEYERFVKESYFGNSKKMKKLLLEDIPDSFIERQLNDSRYISRVVTSLLSNLVCEEGEQDGLSKNVIVCTGGITDRLKKDWGVQEVWNRIILPRFLRLNEITGRTDFTSTSVNGHLLPALPLYLQKGFNKKRIDHRHHAMDAIVIACANRNIVNYLNNSSARKNSEISRYDLQRLLCEKVKTDANGNYKWILRKPWETFTQDVYAALTNIVVSFKQNLRVINRTTNYYQHYNEAGEKRMIPQTKGDRWAIRKPMHKDTVYGEVNLRKEKTLPLRDVVKNPSIVVDKSLKNKLYELLKSQYDLKAIAKYFETHQDVWADVNLKKIKVYYFTKETNERFFATRKSLDPSFDQKKIEEEVTDTGVQKILLHHLQQNNNDPDMAFSPDGIDRMNQNMTILNDGKWHQPIYKVRTYEKADKFAVGESGNKAKKFVEAAKGTNLFFAVYESVQEDEAIGKQVCKRTFATIPLNEVIKRKKQGLPAAPEDLNGNLPKFVLSPNDLVYLPTEEERNSSRIIQPLDRERIYKMVSSSGSQCFFIKVFVANSIWDKNEYSSLNKMERAITNEMIKEICVPIKIDRLGNVSLIQI

SEQ ID NO: 74 - protein, 1504 aa, Bacteroides coprosuis
  Bacteroides coprosuis DSM 18011
MKKVLGLDIGTNSVGWAVVNQNDKGEFLSIEKIGSRIIPMSQDVMDKFGAGQTESSTAQRTQYRGVRRLRERSLLRRERLHRVLHILHFLPQHYDAAIGWNKKENKTYGKFLPGVEVNIPWVATDQGHQFIFMDSYAEMLKDLKQHQPHLFEKSSTPVPLDWTIYYLRKKALTQAISKEELAWILLNFNQKRGYYQLRGEEVEDNTKREEFYALKVVKVELDKDNTSAKTWYKVHLENGFIYPCPSDTPIDSWVGMVKDFIVTTTLEKDGSEKRTADGEIKRSFRAPKEDDWTLLKKKTESELEKSGKQVGAFIYDTLLSNPDQKIIGGLIKTIERKYYKKELEQILETQQKFIAELSDKKLFQACAEELYPLNDSHRENLLERDFKHLFVQDIIFYHRPLKTKKSLISNCTYEYRTFYKNGEKQISPIKCIAKSNPLFQEFRVWQFVQNLRILQRQRSEGDSIKYNVDVTAEFLKDENDIANLFTWLNERKVIKQDQLLKSYFKLKVNKETKELDYRWNYVDDKNKEYPCNATRTHILSFLEKCKEEKRIEDDRFVYSLWHLLYSVVEPIELRGALAKFAEREHLHPSFVDVFAQFPPLEKEYGSYSEKAIKRLLPLMRMGDYWHEDKIDVKTKQRIQRIIDGEADDDITHRSREKVENLRSITDFKGLPLWKAGYVVYNRHSESGELTKWKTPHELSNYIQNEFKQYSLRNPIVEQIVLETLRVVHDLWVKHGDFSEIHLELGRDIKNSSDKRKRMAERQQENENSRQRVLEMLIDLKKEAAFADLNPYSPSQQEKLRIVEDGVLRSNIEIPKDIEKITKSAKPTSRELTKYRLWLDQKYRSPYTGQPISLAQLFTSKYEIEHVIPQAKYFDDSFTNKVICESEVNKEKGSMLAHEFILKNGGSTVNVGGRQVQVLKNDAYVELINRLYGKNNPVKAKKLLAEDIDEVVGDFSERQLNDTRYISRVVQKLLSNIVREEDEQESTSKHVIGCSGQVTTALKKDWGLNDIWNKIIQPRFERLNEMTATEDYGVWQSPNHFQIRVPEEIQKGFTKKRIDHRHHAMDALVIACATRSHINYISNRSGQDRNAKFETTRTDLRSKLCYKENSSGNNYNYIFNKPWDTFTQDAHRALENIVVSHKQNLRVLTKTNNYTQFINKDGKKDLQKQVKGDHFAVRKPMHQETIYGRVSIRSIKEVALKKALENWKQIVDRTLKDKIRELIGAYGKYDAQTILKYFKDRDYKFNNLKINRVEVYEYDHNCAAVRKSIGDDLTIKQIERITDESIRKILMNHLSNYDDNLKEAFSPEGLMEMNKNIKELNGGKNHQPIYKVRLFEDLGSKFPLGVSHNNPDKYAIAAKGTNLFFGIYEDQEGKRMFDSIPLNIVIDRLKEKKSPVPETYNESKLKFHLSPNDLVYVPTDEEQKQPELVDVDHLSDEQKGRVYKAVSFTGNRAFFVNHRVSKVIHDYVEFGTKNKIENDDDKRSLKHICWKLKVNRLGEITDVKR

SEQ ID NO: 75 - protein, 1504 aa, Bacteroides dorei
  Bacteroides dorei DSM 17855
MKNIVGLDLGTNSIGWAVVNGSVNDDGSEQLVKIQASGSRIIPMDAAMIGDFNKGNSISQTAERTRLRGVRRLSERYLLRRERLHRILDILGFLPFHFAQDLDRHGKIVKGKEPKLAWRKNEAGQFEFIFQDSFKEMLEDFKLNYPNLITDDKKVPYDWTIYYLRKKGLTSKISKEELAWILLNFNQKRGYYQLRGEEEEENKDKLVEFYALKVVAVEDSGEKKGKDIWYNVHLENGWVYRRTSNMSLDWVGKTKEFIVTTDLEKDGTPKKDKEGNVKRSFRAPKEDDWSLVKKKTEADIDQTHKTVGAYIYDTLLGNPSQKIRGRLVRTIERKYYKEELKLILEKQKEFHLELQDRALYAACIEELYPINEAHRNNVGNRDFTYLFLEDILFYQRPLKSKKSLIDNCPYEENQGLDKETGEIKSFPVKCIAKSHPLFQEFRLWQFIINLRIYRKDLAQDVDVTNELLKTEEDYVALFDWLNGKKEIDQKAFLKYPVFGLKKEIENYRWNYVQDKPYPCNETRSLMLARLEKCDISIEFLTKENEEALWHILYSVEDKNEIVKALQKFADKHDLNASFVDVFQKFPPFKKEYGSYSAKAIKKLLPLMRMGKYWSENSIDKGTRERIDKIITGEYDEKIENRVREKAIHLADVSDFKGLPLWLVCYIVYGRHSEAKEIIQWKSPADIDSYLRSFKQHSLRNPIVEQIIIETLRVVRDIWKQVGNIDEIHVELGREMKNPADKRKKMTQQMSENENTNLRIKYLLTEFLNPEYEVENVRPYSPSQQDILRIYEEGVLNSVSDLPEEISDILKKFTETDLKKRPSRSEVLRYKLWLEQKYRSPYTGEVIPLGKLFTPAYEIEHVIPQSYYFDDSFSNKVICEAEVNKLKSNLLGHEFIVKHHGEIVELPFGKKVRIFTVDEYEQFVKDNYSRTRSKMKKLLMDDIPEEFVTRQLNDSRYISKVVKSLLSNIVREKGEEEAISKNVIPCTGGVTDRLKKDWGINEVWNKIILPRFQRLNELTGTNKFTTKNVGIQEIPTMPLELQKGFNKKRIDHRHHAMDAIIIACANRNIINYLNNKSATAKAELSRYDLQKMLCDKAKTDNNGNYKWVIRKPWASFTQDTYLALENIIVSFKQNLRVINKATNRFLHYNEEGKKIFVKQGKGDNWAIRKSMHKDTVFGEVNLRRIKTVALNEAMKNPQSIVVKDFKRKLLELWNLGFDAKRIKKYFEDNRETWSDINLSKIEVYYFSKDTKDRFFATRKPLDTSFDRKKIENNITDTGIQKILLRHLELKDNNPDIAFSPDGIDEMNRNIIQLNNGKYHQPIIKIRWYEQADKFAVGQTGNKSSKFVEAAKGTNLFFAVYESNILDKKTNTIIKKRNYATIPLNVAIERQKQGLPVAPEDENGNDPIFVLSPNDLVYLPTDDELANGIIAQPLDRGRIYKMVSSSGEQCFFIKHIVANVLVDKFEFSPLNKMERALTGEMIKMICIPIKVDRLGNVLESSSSYKK

SEQ ID NO: 76 - protein, 1509 aa, Bacteroides eggerthii
  Bacteroides eggerthii 1_2_48FAA
MKTILGLDLGTNSVGWAVINSVIKEQAERIWIEMAGSRIIPMDAAVLGDFDKGNSISQTSERTRLRGARRLRERQLLRRERLHKVLNILGFLPNHYLEYIDFEKHPGKFLADAEPKLAWVKDEQGKYTFLFQAAFDEMLADFAIHQPSLVSGDKKIPYDWTIYYLRKKALTEMISKEELAWILLNFNQKRGYYQLRGEEEEDNAGKSVEFYALKVLTVEATDEKKGRDVWYNVHLENGWIYRRSSSVPLDWEGQVKEFIVTTDLNPDGTPKLDKYGEVKRSFRAPKEDDWMLIKKRTEADIANTHKTVGAYIYDTLLQKPQQKIIGKLVKTVERKLYRDELSLILQKQCAFHAELQDRALYARCVEALYPSNEVRRKNIANRDFVYLLMDDILFYQRPLKTKKSLIANCPYEENEYVDRETGEIKKTPLKCIAKSHPLFQEFRLWNFLSNIRIYQKEKEINGTLHLDVDVTAEFLKTEDDYVALFDWLNSRKEIEQKTFLKYPKFGLKKEISNYRWNYVEDKQYPCNETRHAILSSLEKANVCIDFLSNEKEVALWHILYSVSDKQEIEKALRTFAAKNGLDESFVEAFKKFPPFKSEYGAYSAKAIKKMLPLMRCGKYWDVSSIDDTTKERIKKIVTGEYDERISVKVRDKVMNLSDISCFRRLPLWLACYIVYNRHSEDKEAVKWESPADIDAYLASFKQHSLRNPIVEQVITETLRVVRDIWKQVGRIDEIHIELGREMKNPADKRKRMTAQILENENANLRIKALLAEFMNPEYEIENVRPYSPSQQEILRIYEDTVLHAEDQLPEEIDAILKKFNSSKVPTKSEFLRYKLWLEQKYRSPYTGELIPLGKLFTAAYEIEHVIPQSRYFDDSFSNKVICESAVNKLKDNQLGYEFIKNHHGQKVEVGFGKSVEIFSVDSYERFVKEQYAKSAVKMKKLLMDDIPEQFIERQLNDSRYISKVIKGLLSNIVREKNDSGEYEPEAVSKNIVVCTGSVTDRLKRDWGMNDVWNSIVYPRFERLNSLTDTQSFGHWENKSGKKVFQTELPLEYQKGFSKKRIDHRHHAMDAIVIACATRNHVNYLSNESASRNAKISRYDLQRLLCDKNRTDDNGNYKWVIKKPWDTFTQDAREVLSKIVVSLKQNLRIINKTTNVYRHLDATGNRVYEKQKTGDSWAIRKPMHKDTVFGAVNLRKVKVVRLSVALDTPAMIVDKRVKNKVFELLSYKYDKKRIEKYFKENAFLWKELDLAKVAVYYFTEATTEPLVAVRKPLDSTFNEKKIKESVTDTGIQKILLNHLCTKEGKPDLAFSAEGIEEMNRNLLQLNNGKSHQPIYKVRVYEPRGNKFSVGVLGNKGTKWVEAAKGTNLFFAIYITEDGKRTYETIPLNVVIEREKQGLVPVPDRNKKGDKLLFWLSPNDLVYLPTEEEREFGRINEPIDRGRIYKMVSCTGNEGHFIPANVANPIVPVIELGSNNKAQRAWTNEMIKDICIPIKVDRLGHIIEVKYRIDE

SEQ ID NO: 77 - protein, 1526 aa, Bacteroides faecis
  Bacteroides faecis MAJ27
MKKILGLDLGTNSIGWAVLNAADDNSLKYIEAAGSRIIPMDAAILGDFDRGNSISQTAERTRIRGMRHLRERYLLRRARLHRILNLLGFLPFHYAQDIDRYGNFSADMEPKIAWCKNLEGELEFIFIESFNEMLEDFRKNQPELVADNKKVPYDWVIYYLRKKALEKKISKEELAWILLNFNQKRGYYQLRGEDDDESMKTAKTRQYFDKQIIKNIIDTNQTYKGQRILIVELQNGDKGKIFKKEIPDWIGQEKNIIVTVDIDKDGNDKYEESGSLSCRFKIPTDAEWESEWKLIKMKTQKDLDESNKTVGTYIYDSILQNPTQKVRGKLVRTIERKYYKAELKQILEKQTEFHSELQDKDLYIECLNELYSNNDTHRNAITDRDFVYLFMNDILFYQRPLKSKKSLIDNCPYERNIYIDKETGEIKYSPIKCIAKSHPLFQEFRLWKFISSIRIYQRESVVEVVDKQLDLFSSQSTSVQKLVTDVDVTDKFLTCENDYVALFEWLNKKKIIDQKEFLKYRPFGLKGDIDNYRWNYVEDKSYPCNETHAMILTYFAKAGISEDILTKEMEEALWHILYSVEDRQEITKALRTFASKYHLSDSFVKVFSNIPPFKKEYGSYSAKAIKKLLSLMRMGKYWSEDAIDVNTRERIDKIVTGEYDEKIRDRVREKTIRLNDIRHFRALPDWLACYVVYDRHSETREITEWKSPEEIDEYIRNFKQHSLRNPIVEQVITETLRTVRDIWKQVGCIDEIHVELGREMKNPADKRKRITSQIIENENANLRVKALLTEFVNSEFEIENVRPYSLSQQDILRIYEDGVLNSVAEVPGDIAGILKKFNENDAKKRPTTSEILRYKLWLEQKYRSPYTGEMIPLSKLFTSAYEIEHVIPQSRYFDDSFSNKVICEAEVNKLKDNALGYEFIKKHHGEKVELGFGKIVEIFSVSVYEQFVKDNYSRNRGKMKKLLMDEIPEQFIERQLNDSRYISKVVKTLLSNVVREKAEQEAVSKNVIVCTGGVTDRLKKDWGINDVWNKIVLPRFLRLNELTNSTNFTAKNAAGNEIPAMPLELQKGFNKKRIDHRHHAMDAIVIACANRNIVNYLNNESASRKAKISRHDLQAILCDKVRTDDKGNYQWRVKKPWDTFTQDVYVALENIIVSFKQNLRVINKTSNYYWHYENGKKVLVKQVKGDSWAIRKPMHKDTVFGEVNLRKVKSVSLNEALKNPQFIVEKDLKRQLLSLLQQNFDIKKIKKYFEEHKDIWSDISLSKMNIYYFTKETKDRYFATRKPLDASFDKKKIESCITDTGIQQILLRHLELKENDPERAFSPDGIDEMNRNIIQLNKGKGHHPIAKVRVYEKADKFEVGQRGNKSSKFVEAAKGTNLFFAVYETEYPDEKTNSIVRKRNYATIPLNIAIERQKRGLSTAPEDEKGNVPSFVLSPNDLVYLPTSEDIVNGHITQPIDKSRIYKMVSSSGSQCFFIKHNIANIIVDKYEFSPLNKMERAISNEMIKEICIPVKVDRLGNIVKLGKSE

SEQ ID NO: 78 - protein, 1509 aa, Bacteroides fluxus
  Bacteroides fluxus YIT 12057
MKTILGLDLGTNSVGWAVINSVIKEQAERIWIEMAGSRIIPMDAAVLGDFDKGNSISQTSERTRLRGVRRLRERQLLRRERLHKVLNILGFLPNHYLEYIDFEKHPGKFLSDAEPKLPWVKDEQGKYTFLFQAAFDEMLADFAIHQPSLVSGDKKIPYDWTIYYLRKKALTEMISKEELAWILLNFNQKRGYYQLRGEEEEDNAGKSVEFYALKVLTVEATDEKKGRDVWYNVHLENGWIYRRSSSVPLDWEGQIKEFIVTTDLNPDSTPKLDKYGEVKRSFRAPKEDDWMLIKKRTEADIANTHKTVGAYIYDTLLQKPQQKIIGKLVKTVERKLYRDELSLILQKQCAFHAELQDRTLYARCVEALYPNNEVQRRNIANRDFVYLLMDDVLFYQRPLKTKKSLIANCPYEENEYVDRETGEIKKAPLKCIAKSHPLFQEFRLWNFLSNIRIYQKEKEINGTLHLDVDVTAEFLKTEDDYVALFDWLNSRKEIEQKTFLKYPKFGLKKEISNYRWNYVEDKQYPCNETRHAILSRLEKANVCIDFLSNEKEVALWHILYSVSDKQEIEKALRTFAAKNGLDESFVEAFKKFPPFKSEYGAYSAKAIKKLLPLMRCGKYWDVSSIDDTTKERIKKIVAGEYDERIAVKVRDKVMNLSDISCFKRLPLWLACYIVYNRHSEDKEAVKWESPADIDAYLASFKQHSLRNPIVEQVITETLRVVRDIWKQVGRIDEIHIELGREMKNPADKRKRMTAQILENENANLRIKALLAEFMNPEYEIENVRPYSPSQQEILRIYEDMVLHAEDQLPEEIDAILKKFNSSKVPTKSEFLRYKLWLEQKYRSPYTGELIPLGKLFTAAYEIEHVIPQSRYFDDSFSNKVICESAVNKLKDNQLGYEFIKNHHGQKVEVGFGKSVEIFSVDSYERFVKEQYAKSAVKMKKMLMDDIPEQFIERQLNDSRYISKVIKGLLSNIVREKNDSGEYEPEAVSKNIVVCTGSVTDRLKRDWGMNDVWNSIVYPRFERLNSLTDTQSFGHWENKSGKKVFQTELPLEYQKGFSKKRIDHRHHAMDAIVIACATRNHVNYLSNESASRNAKISRYDLQRLLCDKSRTDDNGNYKWVIKKPWDTFTQDAREVLSKIVVSLKQNLRIINKTTNVYRHLDATGNRVYEKQKTGDSWAIRKPMHKDTVFGAVNLRKVKVVRLSVALDAPTMIVDKRVKNKVFELLSYKYDKKRIEKYFKENAVLWKELDLARVAVYYFTEATTEPLVAVRKPLDSTFNEKKIKESVTDTGIQKILLNHLCTKEGKPDLAFSAEGIEEMNRNLLQLNNGKRHQPIYKVRVYEPRGNKFSVGVLGNKGTKWVEAAKGTNLFFAIYITEDGKRTYETIPLNMVIEREKQGLAPVPDKNEKGDKLLFWLSPNDLVYLPTEEELEFGRINEPIDRGRIYKMVSSSGNQCFFIPQSISNAIIPTKELGANNKAERSWDGAMIKNICIPVKVDRLGRIIEVKYRINE

SEQ ID NO: 79 - protein, 1436 aa, Bacteroides fragilis
MKRILGLDLGTNSIGWALVNEAENKDERSSIVKLGVRVNPLTVDELTNFEKGKSITTNADRTLKRGMRRNLQRYKLRRETLTEVLKEHKLITEDTILSENGNRTTFETYRLRAKAVTEEISLEEFARVLLMINKKRGYKSSRKAKGVEEGTLIDGMDIARELYNNNLTPGELCLQLLDAGKKFLPDFYRSDLQNELDRIWEKQKEYYPEILTDVLKEELRGKKRDAVWAICAKYFVWKENYTEWNKEKGKTEQQEREHKLEGIYSKRKRDEAKRENLQWRVNGLKEKLSLEQLVIVFQEMNTQINNSSGYLGAISDRSKELYFNKQTVGQYQMEMLDKNPNASLRNMVFYRQDYLDEFNMLWEKQAVYHKELTEELKKEIRDIIIFYQRRLKSQKGLIGFCEFESRQIEVDIDGKKKIKTVGNRVISRSSPLFQEFKIWQILNNIEVTVVGKKRKRRKLKENYSALFEELNDAEQLELNGSRRLCQEEKELLAQELFIRDKMTKSEVLKLLFDNPQELDLNFKTIDGNKTGYALFQAYSKMIEMSGHEPVDFKKPVEKVVEYIKAVFDLLNWNTDILGFNSNEELDNQSYYKLWHLLYSFEGDNTPTGNGRLIQKMTELYGFEKEYATILANVSFQDDYGSLSAKAIHKILPHLKEGNRYDVACVYAGYRHSESSLTREEIANKVLKDRLMLLPKNSLHNPVVEKILNQMVNVINVIIDIYGKPDEIRVELARELKKNAKEREELTKSIAQTTKAHEEYKTLLQTEFGLTNVSRTDILRYKLYKELESCGYKTLYSNTYISREKLFSKEFDIEHIIPQARLFDDSFSNKTLEARSVNIEKGNKTAYDFVKEKFGESGADNSLEHYLNNIEDLFKSGKISKTKYNKLKMAEQDIPDGFIERDLRNTQYIAKKALSMLNEISHRVVATSGSVTDKLREDWQLIDVMKELNWEKYKALGLVEYFEDRDGRQIGRIKDWTKRNDHRHHAMDALTVAFTKDVFIQYFNNKNASLDPNANEHAIKNKYFQNGRAIAPMPLREFRAEAKKHLENTLISIKAKNKVITGNINKTRKKGGVNKNMQQTPRGQLHLETIYGSGKQYLTKEEKVNASFDMRKIGTVSKLAYRDALLKRLYENDNDPKKAFAGKNSLDKQPIWLDKEQMRKVPEKVKIVTLEAIYTIRKEISPDLKVDKVIDVGVRKILIDRLNEYGNDAKKAFSNLDENPIWLNKEKGISIKRVTISGISNAQSLHVKKDKDGKPILDENGRNIPVDFVNTGNNHHVAVYYRPVIDKRGQLVVDEAGNPKYELEEVVVSFFEAVTRANLGQPIIDKDYKTTEGWQFLFSMKQNEYFVFPNEKTGFNPKEIDLLDVENYGLISPNLFRVQKFSLKNYVFRHHLETTIKDTSSILRGITWIDFRSSKGLDTIVKVRVNHIGQIVSVGEY

SEQ ID NO: 80 - protein, 1436 aa, Bacteroides sp.
MKRILGLDLGTNSIGWALVNEAENKDERSSIVKLGVRVNPLTVDELTNFEKGKSITTNADRTLKRGMRRNLQRYKLRRETLTEVLKEHKLITEDTILSENGNRTTFETYRLRAKAVTEEISLEEFARVLLMINKKRGYKSSRKAKGVEEGTLIDGMDIARELYNNNLTPGELCLQLLDAGKKFLPDFYRSDLQNELDRIWEKQKEYYPEILTDVLKEELRGKKRDAVWAICAKYFVWKENYTEWNKEKGKTEQQEREHKLEGIYSKRKRDEAKRENLQWRVNGLKEKLSLEQLVIVFQEMNTQINNSSGYLGAISDRSKELYFNKQTVGQYQMEMLDKNPNASLRNMVFYRQDYLDEFNMLWEKQAVYHKELTEELKKEIRDIIIFYQRRLKSQKGLIGFCEFESRQIEVDIDGKKKIKTVGNRVISRSSPLFQEFKIWQILNNIEVTVVGKKRKRRKLKENYSALFEELNDAEQLELNGSRRLCQEEKELLAQELFIRDKMTKSEVLKLLFDNPQELDLNFKTIDGNKTGYALFQAYSKMIEMSGHEPVDFKKPVEKVVEYIKAVFDLLNWNTDILGFNSNEELDNQPYYKLWHLLYSFEGDNTPTGNGRLIQKMTELYGFEKEYATILANVSFQDDYGSLSAKAIHKILPHLKEGNRYDVACVYAGYRHSESSLTREEIANKVLKDRLMLLPKNSLHNPVVEKILNQMVNVINVIIDIYGKPDEIRVELARELKKNAKEREELTKSIAQTTKAHEEYKTLLQTEFGLTNVSRTDILRYKLYKELESCGYKTLYSNTYISREKLFSKEFDIEHIIPQARLFDDSFSNKTLEARSVNIEKGNKTAYDFVKEKFGESGADNSLEHYLNNIEDLFKSGKISKTKYNKLKMAEQDIPDGFIERDLRNTQYIAKKALSMLNEISHRVVATSGSVTDKLREDWQLIDVMKELNWEKYKALGLVEYFEDRDGRQIGRIKDWTKRNDHRHHAMDALTVAFTKDVFIQYFNNKNASLDPNANEHAIKNKYFQNGRAIAPMPLREFRAEAKKHLENTLISIKAKNKVITGNINKTRKKGGVNKNMQQTPRGQLHLETIYGSGKQYLTKEEKVNASFDMRKIGTVSKSAYRDALLKRLYENDNDPKKAFAGKNSLDKQPIWLDKEQMRKVPEKVKIVTLEAIYTIRKEISPDLKVDKVIDVGVRKILIDRLNEYGNDAKKAFSNLDKNPIWLNKEKGISIKRVTISGISNAQSLHVKKDKDGKPILDENGRNIPVDFVNTGNNHHVAVYYRPVIDKRGQLVVDEAGNPKYELEEVVVSFFEAVTRANLGLPIIDKDYKTTEGWQFLFSMKQNEYFVFPNEKTGFNPKEIDLLDVENYGLISPNLFRVQKFSLKNYVFRHHLETTIKDTSSILRGITWIDFRSSKGLDTIVKVRVNHIGQIVSVGEY

SEQ ID NO: 81 - protein, 1512 aa, Bacteroides nordii
  Bacteroides nordii CL02T12C05
MKNILGLDLGTNSIGWAVINSEEDGPIVKKRIELAGSRIIPMDAAVLGNFDSGVTKSQTAERTSFRSIRRLRERQLLRRERLHKVLQILGFLPEHYVNDIDFENHPGKIKRNTEPKLPWRKNSMGQFEFIFQDSFEAMLTDFATHQPVFVSEGKKVPYDWTLYYLRKKALTEGISKEELAWLILNFNQKRGYYQLRGEEEEEQSNKLVEFYALRVVKVEATDDKKGKDTWYNVHLENGWIYRRTSNIPLDWEGKVKEFIVTTDLNEDGTPKLDKYGEVKRSFRAPKEDDWTLIKKKTESDIANSHKTVGCYIYDALLQNPHQKIKGRLVRTVERKFYKEELRLILEKQLSFHPELQDRDLYRACIDALYVSNEAHKNNISGRDFVYLFIDDIIFYQRPLKTKKSLIDNCPYEENQYMDRETGEVKQAPIKCIAKSHPLFQEFRLWQFISNIRIYQRERVLDDGKLETDVDVTPDFLKTEDDYTTLFEWFNDRKEVDQKAFLKNPQFGLKKTFTEYRWNYVEDKSYPCNETRNAILNGLQKAGVSADFLSREVEEALWHILYSVEDKIEIESALRKFASKHDLDDRFADVFKKLPPFKKEYGAYSAKAIKKLLPLMRIGKYWELSNIDDKTKERIDKIITGEWDENIHDRVREKAIKLSDITDFKGLPLWLSCYVVYNRHSEARAIAKWESPEDIDSYLRLFRQHSLRNPIVEQVITETLRTVRDIWKRVGQIDEIHVELGREIKNPADKRAKMTAQIVENENTNLRIKALLAEFINSEYEIENVRPYSSNQQEKLKIYEDTVLNGVKEIPEDINTILKKFRESDLKKRPTKSDFLHYKLWLEQKYCSPYTGRIIPLGKLFTSAYEIEHIIPQAHYFDDSFSNKVICEAEVNGLKDKKLGYEFIKHNPGKMVEIGFGKPPVRIFSVEEYERFVKENYSGIKNKMNKLLMDDIPETFIERQLNDSRYISKVVKSLLSNIVREKDSNGEYEPEAISKNVIVCTGSVTDRLKRDWGVNDVWNSIIYPRFERLNELTGSQQFGCWENKEGKRVFQTAVPLEMQKGFSKKRIDHRHHAMDAIVIACATRNHINYLSNESASKKAKISRTDLQRLLCTKCRTDDNGNYKWIVKKPWPAFTQDIRKALENITVSFKQNLRVINKTTNYYVHFDESGKKVLEKQINGDSWAIRKPMHKDTVFGKVNLQKVKEVRLSLALDTPKMIVDKKLKEKVLQLYSYKYDKKRIDKYFKENASLWKDLNLSKVAVYYFTNDSTEPLVAVRKPLDTSFNAKKIKESVTDTGIQKILLNHLSNNQDDPNLAFSPDGIDKMNKNLTALNDGKYHQPIYKVRVCEPQGNKFSVGTSGNKTSKYVEAAKGTNLFFAVYQTEDGKRSYETIPLNVVIEREKLGWTPVPENNNNGDKLLFWLSPNDLVYVPTADELNNGMRLDNMDKGRIYKMISCSGPQCFFIPQNVSNAIIPVIELGANNKAEKSWNNEMIKVVCVPIRVDRLGCITQINNQK

SEQ ID NO: 82 - protein, 1436 aa, Bacteroides sp.
  Bacteroides sp. 2_1_16
MKRILGLDLGTNSIGWALVNEAENKDERSSIVKLGVRVNPLTVDELTNFEKGKSITTNADRTLKRGMRRNLQRYKLRRETLTEVLKEHKLITEDTILSENGNRTTFETYRLRAKAVTEEISLEEFARVLLMINKKRGYKSSRKAKGVEEGTLIDGMDIARELYNNNLTPGELCLQLLDAGKKFLPDFYRSDLQNELDRIWEKQKEYYPEILTDVLKEELRGKKRDAVWAICAKYFVWKETYTEWNKEKGKTEQQEREHKLEGIYSKRKRDEAKRENLQWRVNGLKEKLSLEQLVIVFQEMNTQINNSSGYLGAISDRSKELYFNKQTVGQYQMEMLDKNPNASLRNMVFYRQDYLDEFNMLWEKQAVYHKELTEELKKEIRDIIIFYQRRLKSQKGLIGFCEFESRQIEVDIDGKKKIKTVGNRVISRSSPLFQEFKIWQILNNIEVTVVGKKRKRRKLKENYSAIFEELNDAEQLELNGSRRLCQEEKELLAQELFVRDKMTKSEVLKLLFDNPQELDLNFKTIDGNKTGYALFQAYSKMIEMSGHEPVDFKKPVEKVVEYIKAVFDLLNWNTDILGFNSNEELDNQSYYKLWHLLYSFEGDNTPTGNGRLIQKMTELYGFEKEYATILANVSFQDDYGSLSAKAIHKILPHLKEGNRYDVACVYAGYRHSESSLTREEIANKVLKDRLMLLPKNSLHNPVVEKILNQMVNVINVIIDIYGKPDEIRVELARELKKNAKEREELTKSIAQTTKANEEYKTLLQTEFGLTNVSRTDILRYKLYKELESCGYKTLYSNTYISREKLFSKEFDIEHIIPQARLFDDSFSNKTLEARSVNIEKGNKTAYDFVKEKFGESGADNSLEHYLNNIEDLFKSGKISKTKYNKLKMAEQDIPDGFIERDLRNTQYIAKKALSMLNEISHRVVATSGSVTDKLREDWQLIDVMKELNWEKYKALGLVEYFEDRDGRQIGRIKDWTKRNDHRHHAMDALTVAFTKDVFIQYFNNKNASLDPNANEHAIKNKYFQNGRAIAPMPLREFRAEAKKHLENTLISIKAKNKVITGNINKTRKKGGVNKNMQQTPRGQLHLETIYGSGKQYLTKEEKVNASFDMRKIETVSKSAYRDALLKRLYENDNDPKKAFAGKNSLDKQPIWLDKEQMRKVPEKVKIVTLEAIYTIRKEISPDLKVDKVIDVGVRKILIDRLNEYGNDAKKAFSNLDKNPIWLNKEKGISIKRVTISGISNAQSLHVKKDKDGKPILDENGRNIPVDFVNTGNNHHVAVYYRPVIDKRGQLVVDEAGNPKYELEEVVVSFFEAVTRANLGLPIIDKDYKTTEGWQFLFSMKQNEYFVFPNEKIGFNPKEIDLLDVENYGLISPNLFRVQKFSLKNYVFRHHLETTIKDTSSILRGITWIDFRSSKGLDTIVKVRVNHIGQIVSVGEY

SEQ ID NO: 83 - protein, 1517 aa, Bacteroides sp.
  Bacteroides sp. 20_3
MKKIVGLDLGTNSIGWALINAYINKEHLYGIEACGSRIIPMDAAILGNFDKGNSISQTADRTSYRGIRRLRERHLLRRERLHRILDLLGFLPKHYSDSLNRYGKFLNDIECKLPWVKDETGSYKFIFQESFKEMLANFTEHHPILIANNKKVPYDWTIYYLRKKALTQKISKEELAWILLNFNQKRGYYQLRGEEEETPNKLVEYYSLKVEKVEDSGERKGKDTWYNVHLENGMIYRRTSNIPLDWEGKTKEFIVTTDLEADGSPKKDKEGNIKRSFRAPKDDDWTLIKKKTEADIDKIKMTVGAYIYDTLLQKPDQKIRGKLVRTIERKYYKNELYQILKTQSEFHEELRDKQLYIACLNELYPNNEPRRNSISTRDFCHLFIEDIIFYQRPLKSKKSLIDNCPYEENRYIDKESGEIKHASIKCIAKSHPLYQEFRLWQFIVNLRIYRKETDVDVTQELLPTEADYVTLFEWLNEKKEIDQKAFFKYPPFGFKKTTSNYRWNYVEDKPYPCNETHAQIIARLGKAHIPKAFLSKEKEETLWHILYSIEDKQEIEKALHSFANKNNLSEEFIEQFKNFPPFKKEYGSYSAKAIKKLLPLMRMGKYWSIENIDNGTRIRINKIIDGEYDENIRERVRQKAINLTDITHFRALPLWLACYLVYDRHSEVKDIVKWKTPKDIDLYLKSFKQHSLRNPIVEQVITETLRTVRDIWQQVGHIDEIHIELGREMKNPADKRARMSQQMIKNENTNLRIKALLTEFLNPEFGIENVRPYSPSQQDLLRIYEEGVLNSILELPEDIGIILGKFNQTDTLKRPTRSEILRYKLWLEQKYRSPYTGEMIPLSKLFTPAYEIEHIIPQSRYFDDSLSNKVICESEINKLKDRSLGYEFIKNHHGEKVELAFDKPVEVLSVEAYEKLVHESYSHNRSKMKKLLMEDIPDQFIERQLNDSRYISKVVKSLLSNIVREENEQEAISKNVIPCTGGITDRLKKDWGINDVWNKIVLPRFIRLNELTESTRFTSINTNNTMIPSMPLELQKGFNKKRIDHRHHAMDAIIIACANRNIVNYLNNVSASKNTKITRRDLQTLLCHKDKTDNNGNYKWVIDKPWETFTQDTLTALQKITVSFKQNLRVINKTTNHYQHYENGKKIVSNQSKGDSWAIRKSMHKETVHGEVNLRMIKTVSFNEALKKPQAIVEMDLKKKILAMLELGYDTKRIKNYFEENKDTWQDINPSKIKVYYFTKETKDRYFAVRKPIDTSFDKKKIKESITDTGIQQIMLRHLETKDNDPTLAFSPDGIDEMNRNILILNKGKKHQPIYKVRVYEKAEKFTVGQKGNKRTKFVEAAKGTNLFFAIYETEEIDKDTKKVIRKRSYSTIPLNVVIERQKQGLSSAPEDENGNLPKYILSPNDLVYVPTQEEINKGEVVMPIDRDRIYKMVDSSGITANFIPASTANLIFALPKATAEIYCNGENCIQNEYGIGSPQSKNQKAITGEMVKEICFPIKVDRLGNIIQVGSCILTN

SEQ ID NO: 84 - protein, 1424 aa, Bacteroides sp.
  Bacteroides sp. 3_1_19
MKRILGLDLGTNSIGWALVNEAETDEEVSSIIRLGVRVNPLTVDETQNFEKGKSITTNAERTLKRSMRRNLQRYKLRRDALVEFLKELGFITDETILSEQGNRTTFETCRLRAKAAEEEISLEELSRVLLMINKKRGYKSSRKVKKEEDGVLIDGMEIAKKLYEEDLTPGQLCSQLLESGKKVLPDFYHSDLQEELDRIWSVQKQFHPDVFCDAAKEEIKGKNRSQTWAILANYFVWKEEVVGWNDREAKNETIEKECKLVGLKRTTKGYELKKENYRWRAQALTEQLGLEEIAVVLQEINGQINASSGYLGAISDRSKVLYFNHQTVGQYQMAELDKNPHASLRNMVFYRQDYLDEFDRIWEKQAEFHKELTAELKKEIRDMIIFYQRRLKSQKGLISFCEFERLEIVVEKDGKKQTKVIGCKVIPRSHPLFQEFKVWQTLNDIKVLGREKKRNALSASESRALYPEEKEILARELAIKENMKKADVLKLLFENPQELDLNFKQIDGNRTGFSLFSAYSKMIEKYGYEPLDFKKPADEIIGQLRTIFTDLGWNTNLFTIDLTKEGKELEMQPYFRLWHLLYSFEGDNTSTGNGKLIEKIMQLCGVEKEYAVELASLSFQDDYGSLSAKAIKRILPYLKEGNLYDVACEYAGYRHSKSSLTKEEIENKVLKGKLEVLPKNSLRNPVVEKILSQMVNVINTIIDTYGKPDEIRVELARELKKSAKEREELTKAIAKSTREHEEIRKLLQDEFGMMNVSRNDIIRYKLYEELKDNGYKTLYSNQYIPKEKIFSKEIDIEHIIPQSRLFDDSLSNKTLEYKAINIEKGNKTAYDFVKEKYGEEGLQQYINRCESLFNDKKAKLRKLKMEQKDIPDGFIDRDLRNTQYIAKKALAMLNEICRRVVATTGSITDQLREDWQLVDVMKELNLPKYEALGFVETYEDKDGRKIKRIKDWTKRNDHRHHAMDALTVAFTKDAFIQYFNNKNAAQDSGNRNHTNIIGIKTRYFDKGRALPPIPLEQFRIEAKQHLEKLLVSIKAKNKVVTVNVNRTKKRKGENTKIQQTPRGQLHLETVYGSHKQYVTKIEKVNASFDAAKIATVSKRAYRNALLKRLETFGNDPKKAFTGKNALEKNPLYADKYQTIRVPEKVQTVEFETIYTIRKPVDPALNVDKVVDVKVRAILERRLKEYGGDPKKAFVNFWENPIWLNKEKGISIKRVSIRGINNAQSIHVKKDKNGNPIWDENGKQIPVDFVNTGNNHHVAIYRKPVLDKKGQVTFDEDGNLMYELDEVVVPFFEAVTRANLGLPIIDKDYRKSEGWQFLFSMKQNEYFVFPNEKTGFNPKEVDLLNPDNYAMISPNLFRVQTMSKVMYGNNVVRDYKFRHHLETTVKDMKELKDIAYKQYKTLSFGNSVVKIRINHIGQIVSVGEY

SEQ ID NO: 85 - protein, 1510 aa, Bacteroides sp.
  Bacteroides sp. D2
MKRILGLDLGTNSIGWALVDSEEQRILGMGSRIIPMDQGVLDTFSGGNPVETQTAARTAYRGTRRLRERALLRRERLIRVLNMMKFLPEHYASQIDFEKRLGQFFDEKEPKLAWKQNDEGRFEFIFQQSFNEMIEEFKNKGVVREDKKIPYDWTIYYLRKKALSQEIEKEELAWILLNFNQKRGYYQLRGEEEEENPNKLVEYYSLKIVDVIADEKPNSKGDIWYSLHLENGWIYRRSSKIPLFGWKDKTRDFIVTTDLNDDGTVKKDKEGIEKRSFRAPSENDWVLLKKKTESDIEKSHKTVGAYVYETLLQNPMQKVRGKLVRTIERKFYKDELKQILEKQREFHPELRDEDLYNDCVRELYRSNETYQFILSKRDFVHLFLDDILFYQRPLRSQKSAIGDCILEFKTYKDKDGNNIKEYLKVISKSNPLYQEFRIWQWLYNLKIYRKEDDEDVTLQFIANIEDKEQLFDFLSNRKSIEQKPLLEYLIKAKGLKKQVKTEAYRWNYVEDKIYPCSETKTMISTRLAKVENIPDNFFTKEIEQKLWHIIYSVTDKNEFEKALRTFAKKYDLDIASFVDNFKKIPPFKNEYGSFSEKAIKKLLPLMRLGKYWKWNDIDNNTQNRISKIITGEYDEEIKDIVREKSIALTNENDFQGLQLWLAQYLVYGRHSEADIAGKWHSVADLEKYLNEFKQHSLRNPIVEQIITETLRVVRDIWRKYGQGAENFFSEIHVELGRDMKNTADERKKIVNVVTENENTNLRIKALLMELKNNSDGKLEVENVRPYSPTQQDILKIYEEYAISTGLDNEKDEKVKEDIKKISRVAQPTTTELQRYKLWLEQKYCSPYTGKVIPLGKLFTEEYQIEHIIPKSRYYDDSFSNKVICEAAVNKLKDKCLGLEFIKNYHGQIVETGFGQKVTIFDEEAYQNFVKQHYAYNRSKRTKLLLEEIPEKMIERQMNDTRYISKFVLPLLSNLVRAEENDNGVNSKNVLPVNGKITTMLKQDWGLNDVWNDLILPRFVRMNELAKTIAFTSWNEQHQKYLPTVPLELSKGFQKKRIDHRHHAMDALVIACATRDHVNLLNNKHANTDTIRYDLQRKLRLFERVTYIDPQTKNNVTKDIPKEFKKPWDNFTVDARNELEKIIVSFKQNLRIINKATNIYTKYENGKKIKVGQKGLNWAIRKPLHKETVFAKVSLRKRKTVRLSEALKDWKKIVDKKLKQEIKRLTCQYGKFDVDTILRYFKDRKYQFGEVDVSKVKMYYFDEENAAVRKNVDTSFTEKFIQGSVTDTGIQKILLNHLEAKGNKVEIAFSPEGIEEMNKNIIQLNEGKLHLPIFKVRVYETIGNKFSVGVKGNKKDKYVEAAKGTNLFFAIYVDENGIRSYETIPLNIVIERLKQGLSVVPEKNRKEHSLLFYLSPNDLVYVPIEDERENIHAVNLDQLNNEQRKRIYKMVSCTGSECHFVPYYVASPIVNKVEYSSLNKIGRSLTGEMIKDVCIKLKVDRLGNVKGISGL

SEQ ID NO: 86 - protein, 1436 aa, Bacteroides sp.
  Bacteroides sp. D2
MKRILGLDLGTNSIGWALVDEAENKDERSSIVKLGVRVNPLTVDELTNFEKGKSITTNADRTLKRGMRRNLQRYKLRRETLMEVLKEHKLITEDTILSENGNRTTFETYRLRAKAATEKISLEEFARVLLMINKKRGYKSCRKAKGAEEGTLIDGMDIARELYNNNLTPGELCLQLLDAGKKYLPDFYRSDLQNELDRIWEKQKEYYPEILTEVLKEELRGKKRDAVWAICAKSFVWEEYYTEWNKEKGKTEQQEREHKLEGIYSKRKRDEAKRENLQWRVNGLKEKLSLEQLVIVLQEMNIQINNSSGYLGAISDRSKELYFNKQTVGQYQMEMLDKNPNASLRNMVFYRQDYLDEFNTLWEKQAEYHKELTGELKKEIRDIVIFYQRRLKSQKGLVGFCEFESRQIEVEIDGKKKIKTVGNRVIPRSSPLFQEFKIWQILNNIEVTVVGKKGKRRKQKDNSPTLFDGLDDTEQLELNGSRYLYQEEKELLAQELFVRDKMTKSDVLKLLFDNPQELDLNFKTIDGNKTGYTLFQAYSKMIEMSGHEPVDFKKTVEKVVEHVKAVFDLLNWNTDILGFNSNEELDNQSYYKLWHLLYSFEGDNTPTGNARLVQKITELYGFEKEYAIILANVTFQDDYGSLSAKAIHKILPHLKEGNRYDVACAYAGYKHSESSLTKEEIANKALKDRLTLLPKNNLRNPVVEKILNQMVNVINAIIDTYGKPDEIRVELARELKKNAKEREELTKFIAETTRKHEEFKILLQSEFGLTNVSRTDILRYKLYKELESCGYKTLYSNTYIPREKLFSKEFDIEHIIPQARLFDDSFSNKTLEARSINLEKGNKTAYDFVKEKFGESGADNSLDHYLNNIEDLFKSGKISKTKYNKLKMAEQDIPDGFINRDLRNTQYIAKKALSMLNEISRRVVATSGTITDKLRQDWQLVDVMKELNWEKYKALGLVEYFEDKDGRQIGRIKDWTKRNDHRHHAMDALTVAFTKDIFIQYFNNKNASLNSNTNEYAIKNKYFQNGRAIAPIPLREFRVEAKKHLENTLISIKAKNKVVTGNINKTKKRGGVNKYLQQTPRGQLHLETIYGSGKQYLTKEEKVNASFDMKKIATVSKSAYRDVLLKRLHENDNDPKKAFTGKNSLDKQPIWLDKEQTRKVPEKVKTVTLETIYTVRKEISPDLKVDKVIDAGVRKILTGRLNEYGNDAKKAFSNLDENPIWLNKEKGISIKRVTISGISNAQSLHVKKDKDGKPILDEDSRNIPVDFVNTGNNHHVAVYRRPVIDKRGQLVIDEAGNPKYELEEVVVSFFEAVTRANLGQPIIDKDYKTSEGWQFLFSMKQNEYFVFPNEKTGFNPKEIDLLDAENYGVISPNLFRVQKFAHKNYVFRHHLETTIKDTSSILKGITWIDFRSSKGLDAIVKVRVNHIGQIVSVGEY

SEQ ID NO: 87 - protein, 1508 aa, Bacteroides uniformis
  Bacteroides uniformis CL03T00C23
MRTILGLDLGTNSIGWAVINSVIKEQTERIWIEMAGSRIIPMDAAILGDFDKGNSISQTAERTRFRGVRRLRERQLLRRERLHKVLKILGFLPEHYLKGIDFEKHTGKFLSGSEPKLPWVKDRWGKYSFLFQTAFNEMLADFAKHQPSLVFDGKKIPYDWTVYYLRKKALTEMISKEELAWILLNFNQKRGYYQLRGEEEEDNAGKSVEFYALKVLSVEATDEKKGRDIWYNVHLENGWVYRRSSNVPLDWEGRVKEFIVTTDLNPDGTPKLDKYGEVKRSFRAPKEDDWMLIKKRTEADITGTHKTIGSYIYDALLQEPQQKIIGKLVKTVERKFYKEELNFILQKQCAFHAELQDRDLYMRCIEALYPGNEVQRRNIANRDFIYLLIDDVLFYQRPLKTKKSLIANCPYEENEYVNRKTGEIKTAPLKCIAKSHPLFQEFRLWYFLSNIRVYQKEREVNGTLHLDVDVTTEFLKTEDDYVALFDWLNSRKEIDQKAFLRYPAFGLKKEINNYRWNYVEDKFYPCNETRHAILSRLEKAGIGIDFLSDEKETALWHILYSVSDKQEIEKALATFAVKNGLNESFVEVFKKFPPFKSEYGAYSAKAIKKLLPLMRCGKYWDMSLIDGTTKERIERIIAGECDESIGAKVREKAMNLSDISCFKRLPLWLACYVVYNRHSEDKEITKWETPADIDAYLAAFKQHSLRNPIVEQVITETLRVVRDIWKQVGKIDEIRIELGREMKNPADKRKRMTTQILENENANLRIKALLAEFVNPEYGVENVRPYSPSQQEILRIYEDAVLKGEEQIPEDIDVILKKFNTSKLPTKSEFLRYKLWLEQKYRSPYTGELIPLAKLFTAAYEIEHVIPQSRYFDDSFSNKVICESAVNKLKDNQLGYEFIKNHHGQKVEVGFGKTVEIFSVDSYERFVKEQYAKSGIKMKKLLMDDIPEQFIERQLNDSRYISKVVKGLLSNIVREKNDSGEYEPEAVSKNILVCTGSVTDRLKKDWGMNDVWNSIVSPRFERLNALTETQCFGHWENKDGKKVFQTAVPLEYQKGFSKKRIDHRHHAMDAIVIACATRNHVNYLNNESASRNAKISRYDLQRLLCDKSRGDGNGNYRWIIKKPWTTFTQDAREALSGIIVSLKQNLRIINKTTNIYQHFDANGTRVYEKQKIGDSWAIRKPMHKDTVFGAVNLRKVKVVRLSVALDTPSMIVNKRVKNKVLELLSYKYDKKKIEKYFKENAFLWKELDIAKVAVYYFTENTTEPLVAVRKSLDSTFNEKKIASVTDTGIQKILLNHLKSKEGKAELAFSAEGIEEMNRNLLQLNDGKGHQPIYKVRVYEPRGNKFKVGVLGNKGAKWVEAAKGTNLFFAIYITEDGNRTYETIPLNWVIEREKQGLVPVPDRNEKGDKLLFWLSPNDLVYLPTEEERDFGRINEPIDRGRIYKMVSSSGNQCFFIPQSISNAIISTKELGSNNKAEKSWDGEMIKNICIPVKVDRLGRIIEVKYRVNE

SEQ ID NO: 88 - protein, 1504 aa, Bacteroides vulgatus
  Bacteroides vulgatus CL09T03C04
MKNIVGLDLGTNSIGWAVVNGSVNDDGSEQLVKIQASGSRIIPMDAAMIGDFNKGNSISQTAERTRLRGVRRLSERYLLRRERLHRILDILGFLPFHFAQDLDRHGKIVKGKEPKLAWRKNEAGQFEFIFQDSFKEMLEDFKLNHPNLITDDKKVPYDWTIYYLRKKGLTSKISKEELAWILLNFNQKRGYYQLRGEEEEENKNKLVEFYALKVVAVEDSGEKKGKDIWYNVHLENGWVYRRTSNMPLDWVGKTKEFIVTTDLEKDGTPKKDKEGNVKRSFRAPKEDDWSLLKKKTEADIDQTHKTVGVYIYDTLLGNPSQKIRGRLVRTIERKYYKEELKQILEKQKEFHLELQDRALYAACIEELYPINEAHRNNVGNRDFTYLFLEDILFYQRPLKSKKSLIDNCPYEENQGLDKETGEIKSFPVKCIAKSHPLFQEFRLWQFIVNLRIYRKDLAQDVDVTNELLKTEEDYVALFDWLNGKKEIDQKAFLKYPVFGLKKEIENYRWNYVQDKPYPCNETRSLMLARLEKCDISIEFLTKENEEALWHILYSVEDKNEIVKALQKFADKHDLNASFVDVFQKFPPFKKEYGSYSAKAIKKLLPLMRMGKYWSENSIDKGTRERIDKIITGEYDEKIENRVREKAIHLADVSDFKGLPLWLVCYIVYGRHSEAKEITQWKSPADIDSYLRSFKQHSLRNPIVEQIIIETLRVVRDIWKQVGNIDEIHVELGREMKNPADKRKKMTQQMSENENTNLRIKYLLTEFLNPEYEVENVRPYSPSQQDILRIYEEGVLNSVSDLPEEISDILKKFTETDLKKRPSRSEILRYKLWLEQKYRSPYTGEVIPLGKLFTPAYEIEHVIPQSCYFDDSFSNKVICEAEVNKLKSNLLGHEFIVKHHGEIVELPFGKKVRIFTVDEYEQFVKDNYSRTRSKMKKLLMDDIPEEFVTRQLNDSRYISKVVKSLLSNIVREKGEEEAISKNVIPCTGGVTDRLKKDWGINEVWNKIILPRFQRLNELTGTNKFTTKNVGIQEIPTMPLELQKGFNKKRIDHRHHAMDAIIIACANRNIINYLNNESATAKAELSRYDLQKMLCDKAKTDNNGNYKWVIRKPWASFTQDTYLALENIIVSFKQNLRVINKATNRFLHYNEEGKKIFVKQGKGDNWAIRKSMHKDTVFGEVNLRRIKTVALNEAMKNPQSIVVKDFKRKLLELWNLGFDAKRIKKYFEDNRETWSDINLSKIEVYYFSKDTKDRFFATRKPLDTSFDRKKIENNITDTGIQKILLRHLELKDNNPDIAFSPDGIDEMNRNIIQLNNGKYHQPIIKIRWYEQADKFAVGQTGNKFSKFVEAAKGTNLFFAVYESNILDKKTNTIIKKRNYATIPLNVAIERQKQGLPVAPEDENGNDPIFVLSPNDLVYLPTDDELANGIIAQPLDRGRIYKMVSCTGNEGHFIPARIANPILQTIELGSNNKAQKAWTDEMIKEICMPIKVDRLGNVLESSSSYKK

SEQ ID NO: 89 - protein, 1434 aa, Unknown
  Description of Unknown: Bacteroidetes oral taxon 274 str. F0058 polypeptide
MKNILGLDLGTNSIGWAYVKQAQNDSEKSEIAELGVRVNPLTVDEKTNFEKGKPISTNADRTLKRGARRNLQRYKLRRQELIELLKDYQVISDKTILAEDGKETTFETLRLRVKSAKEQVSLEELARILLMINKKRGYKSSRKAKNEDEGQLIDGMEIARRLYDENLTTGQLSLQLLKEGKKSLPDYYRSDLQHELDKVWNFQKQFHPDILTDEFYTSIQGKGQKATRESFSSKYGIDTAENKGSREEKKLQAYQWRADATHKELTKEELAFVITEINNNINNSSGYLGAISDRSKELIFANETVGEYLWKQIQNDPHTSLKNQVFYRQDYFDEFERIWETQSGFYPQILTESLKNELRDILIFYQRKLKSQKALVSICEFESKEIPLKDKQGNPISKNGIPVTKLVGPKVAPKSSPLFQEFKIWQNLNNVLVRPKGSRKRKVTTNQQSTLLEGQEPVFELNLEQKELLFEELNLKGNLKTDYCLELIGYSAKEWEMNYPTLEGNKTNKALYEAYLKIIDSEGYDAKKLLKVKTDKDDINLDDIKVSASEIKTMISDIFNELGINTKILDFDAELERKQFEAQASYRLWHLLYSYEGDDSKSGNELLYRLLEDKFGFKREHSKTLANVSLLSDYGNLSTKAIRTIYPYIKENKFSTACELAGYRHSKLSISKEENENRTLKDTLDVLKKNSLRQPVVEKILNQMINLINELIEKHSEKDEKGNIVKYFKFDEIHIELARELKKNAEERRELDSKVREGKDRNEKIITILKSEFGLPYPTKNDITRYRLYEELKDNGYKDLYTNTYIPREKLFSKEIDIEHIIPKSRLFNDSFSNKTICYRQDNLNKGERTAYDYIEGLGKTQLDEYLNRVENLYTNKFITKAKYRNLLKKESEIGDGFIERDLRETQYIAKKAKEMLLQITRHVVSTTGSITDRLRDDWELVNVMRELNLPKYKVLGLTEIQERKNGQTVEVITDWTKRNDHRHHAMDALTVAFTKHSHIQYLNFLNARKDEKHKEYSNIMGIQQLETEKTTDKDGKDRRVFKTPIPNFRQVAKEHLESILISHKTKNKVVTRATNKIAGSKKQQETLSPRGQLHKETVYGKYRRYVQKEEKIGSKFDLQTIERVANPLYKRLLTKRLEENGGDPKKAFTGKNALAKSPIYLDETQTQQLPEKVKLVWLETDFSIRKDITPDNFKDEKSIDKVLDEGIKRILKDRLKSFDGDAKRAFTDLEQNPIWLNKEKGIAIKRVTISGVSNAEPLHTKKDHLGNEIFDDTGKPIPVDYVSTGNNHHIAIYRDENGNLQEKAVSFFEAVTRANQGLPTVDKTYNQHLGWQFLFTMKQNEMFVFPNKETGFDPQEIDLLDPKNKKLISPNLFRVQKISTKNYFFRHHLETSVETHNALNGVTYKSQLGLNGITDIIKVRINHLGDIVHIGEY

SEQ ID NO: 90 - protein, 1153 aa, Barnesiella intestinihominis
  Barnesiella intestinihominis YIT 11860
MKNILGLDLGLSSIGWSVIRENSEEQELVAMGSRVVSLTAAELSSFTQGNGVSINSQRTQKRTQRKGYDRYQLRRTLLRNKLDTLGMLPDDSLSYLPKLQLWGLRAKAVTQRIELNELGRVLLHLNQKRGYKSIKSDFSGDKKITDYVKTVKTRYDELKEMRLTIGELFFRRLTENAFFRCKEQVYPRQAYVEEFDCIMNCQRKFYPDILTDETIRCIRDEIIYYQRPLKSCKYLVSRCEFEKRFYLNAAGKKTEAGPKVSPRTSPLFQVCRLWESINNIVVKDRRNEIVFISAEQRAALFDFLNTHEKLKGSDLLKLLGLSKTYGYRLGEQFKTGIQGNKTRVEIERALGNYPDKKRLLQFNLQEESSSMVNTETGEIIPMISLSFEQEPLYRLWHVLYSIDDREQLQSVLRQKFGIDDDEVLERLSAIDLVKAGFGNKSSKAIRRILPFLQLGMNYAEACEAAGYNHSNNYTKAENEARALLDRLPAIKKNELRQPVVEKILNQMVNVVNALMEKYGRFDEIRVELARELKQSKEERSNTYKSINKNQRENEQIAKRIVEYGVPTRSRIQKYKMWEESKHCCIYCGQPVDVGDFLRGFDVEVEHIIPKSLYFDDSFANKVCSCRSCNKEKNNRTAYDYMKSKGEKALSDYVERVNTMYTNNQISKTKWQNLLTPVDKISIDFIDRQLRESQYIARKAKEILTSICYNVTATSGSVTSFLRHVWGWDTVLHDLNFDRYKKVGLTEVIEVNHRGSVIRREQIKDWSKRFDHRHHAIDALTIACTKQAYIQRLNNLRAEEGPDFNKMSLERYIQSQPHFSVAQVREAVDRILVSFRAGKRAVTPGKRYIRKNRKRISVQSVLIPRGALSEESVYGVIHVWEKDEQGHVIQKQRAVMKYPITSINREMLDKEKVVDKRIHRILSGRLAQYNDNPKEAFAKPVYIDKECRIPIRTVRCFAKPAINTLVPLKKDDKGNPVAWVNPGNNHHVAIYRDEDGKYKERTVTFWEAVDRCRVGIPAIVTQPDTIWDNILQRNDISENVLESLPDVKWQFVLSLQQNEMFILGMNEEDYRYAMDQQDYALLNKYLYRVQKLSKSDYSFRYHTETSVEDKYDGKPNLKLSMQMGKLKRVSIKSLLGLNPHKVHISVLGEIKEIS

SEQ ID NO: 91 - protein, 1352 aa, Belliella baltica
MKKILGLDLGTTSIGWAFIKEPEKDVVGSEIVDMGVRIVPLSSDEENDFAKGNTISINADRTLKRGARRNLQRFKQRRNALLEIFKEKKLISTNFKYAEDGPSSTFSTLNLRAKAAKEKIELQDLVKVLLQINKKRGYKSSRKAKSEEDDGSAIDSMGIAKELYENDLTPGQWVYEALQKGRKNVPDFYRSDLQEEFKKIVNYQSEFFPDIFNASFVEDWMGKASTPTKQYFNKKGVQLAENKGKREERRLQEYKWRAEAVNFKIDLSEIALILSQINSQISNSSGYLGAISDRSKELYFKNLTVGQYLYQQIKKNPHTRLKGQVFYRQDYLDEFERIWSVQSSFYPQLNDALKREVRDITIFFQRRLKSQKHLISNCEFEDHHKVVPKSHPVFQEFRIWQNLNNLLLIKKDNLNEKFDLELESKIALANELAFKRELNVKDALKILGLKPNEWEFNFTKIEGNRTNQAFFDAFAKIIELEDGEPIDLGDLKADDILDQFSEAFLRIGIDTELLQVNSDIEGAEYEKQSYIQFWHLLYSSEDDQKLKLNLIRKFGFKPEHAKILASISLQDDHASLSSRAIKKILPHLQSGLIYDKACTYAGYNHSSSFTKDENEKRELRAELELLKKNSLRNPVVEKILNQMINVVNAILKDPELGRPDEIRVEMARELKANAEQRKNMTSNIASATRDHDKYREILKSEFGLKRVTKNDLLRYKLWLETDGISLYTGKPIEASKLFSKEYDIEHIIPKARLFDDSFSNKTICERQLNIDKANVTAFSFLQNKLSADEFEQYQSRVKSLYGKLSKAKIQKLLMANDKIPEDFIARQLQETRYISKKAKEILFEISRRVSVTTGTITDKLREDWGLVEIMKELNWEKYDKLGLTYTIEGKHGERLNKIKDWSKRNDHRHHAMDALTVALTKPAYIQYLNNLNAKGLNNKKGTEVFAIEQKYLKRENGKLCFIPPIENIRSEAKKHLSRILVSYKAKNKVVTINKNKTKSKAGLNEQIALTPRGQLHKETVYGKSFHYSTKFEKIGASFNVQKINTVAKKEEREALLKRLAENGNDPKKAFTGKNTLNKMPIYLDLGKNIKLSEKVKTVVLEQNYTIRKNIDPDLKVDKVIDVGIKRILESRLEEFGGNAKLAFSNLEENPIWLNKEKGISIKRVKISGVSNVESLHVKKDHFGEPILDQEGNEIPVDFVSTGNNHHVAIYEDENGNLQEEVVSFFEAVVRQNQGLPIIKKNHTLGWKFLFTLKQNEYFVFPSDDFVPADVDLMDEQNYHLISPNLFRVQKIARKNYVFNNHLETKAVDNDLLKSKKELSKITYHFYQTPEHLRGIIKIRINHLGKIIQIGEY

SEQ ID NO: 92 - protein, 1415 aa, Bergeyella zoohelcum
  Bergeyella zoohelcum ATCC 43767
MKHILGLDLGTNSIGWALIERNIEEKYGKIIGMGSRIVPMGAELSKFEQGQAQTKNADRRTNRGARRLNKRYKQRRNKLIYILQKLDMLPSQIKLKEDFSDPNKIDKITILPISKKQEQLTAFDLVSLRVKALTEKVGLEDLGKIIYKYNQLRGYAGGSLEPEKEDIFDEEQSKDKKNKSFIAFSKIVFLGEPQEEIFKNKKLNRRAIIVETEEGNFEGSTFLENIKVGDSLELLINISASKSGDTITIKLPNKTNWRKKMENIENQLKEKSKEMGREFYISEFLLELLKENRWAKIRNNTILRARYESEFEAIWNEQVKHYPFLENLDKKTLIEIVSFIFPGEKESQKKYRELGLEKGLKYIIKNQVVFYQRELKDQSHLISDCRYEPNEKAIAKSHPVFQEYKVWEQINKLIVNTKIEAGTNRKGEKKYKYIDRPIPTALKEWIFEELQNKKEITFSAIFKKLKAEFDLREGIDFLNGMSPKDKLKGNETKLQLQKSLGELWDVLGLDSINRQIELWNILYNEKGNEYDLTSDRTSKVLEFINKYGNNIVDDNAEETAIRISKIKFARAYSSLSLKAVERILPLVRAGKYFNNDFSQQLQSKILKLLNENVEDPFAKAAQTYLDNNQSVLSEGGVGNSIATILVYDKHTAKEYSHDELYKSYKEINLLKQGDLRNPLVEQIINEALVLIRDIWKNYGIKPNEIRVELARDLKNSAKERATIHKRNKDNQTINNKIKETLVKNKKELSLANIEKVKLWEAQRHLSPYTGQPIPLSDLFDKEKYDVDHIIPISRYFDDSFTNKVISEKSVNQEKANRTAMEYFEVGSLKYSIFTKEQFIAHVNEYFSGVKRKNLLATSIPEDPVQRQIKDTQYIAIRVKEELNKIVGNENVKTTTGSITDYLRNHWGLTDKFKLLLKERYEALLESEKFLEAEYDNYKKDFDSRKKEYEEKEVLFEEQELTREEFIKEYKENYIRYKKNKLIIKGWSKRIDHRHHAIDALIVACTEPAHIKRLNDLNKVLQDWLVEHKSEFMPNFEGSNSELLEEILSLPENERTEIFTQIEKFRAIEMPWKGFPEQVEQKLKEIIISHKPKDKLLLQYNKAGDRQIKLRGQLHEGTLYGISQGKEAYRIPLTKFGGSKFATEKNIQKIVSPFLSGFIANHLKEYNNKKEEAFSAEGIMDLNNKLAQYRNEKGELKPHTPISTVKIYYKDPSKNKKKKDEEDLSLQKLDREKAFNEKLYVKTGDNYLFAVLEGEIKTKKTSQIKRLYDIISFFDATNFLKEEFRNAPDKKTFDKDLLFRQYFEERNKAKLLFTLKQGDFVYLPNENEEVILDKESPLYNQYWGDLKERGKNIYVVQKFSKKQIYFIKHTIADIIKKDVEFGSQNCYETVEGRSIKENCFKLEIDRLGNIVKVIKR

SEQ ID NO: 93 - protein, 1430 aa, Bergeyella zoohelcum
  Bergeyella zoohelcum CCUG 30536
MKHILGLDLGTNSIGWAVVKEAQNDNEQSEIVDVGVRVNPLTTDEKTNFEKGKPISTNADRTLKRSARRNLQRYKLRRKELIELLKEHQLISTDTILTENGKGTTFQTLELRAKSAKEKISLEELARVFLTINKKRGYKSSRKAKNEDEGQLIDGMEIAKRLYEENLTTGQLSLQLLKEGKKSLPDYYRSDLQFELDKVWNFQKQFHSDILTDEFYAQLKGKGQRATSALFLAKYQIYTAENKGSREDKKLQAYQWRVDALSKELTREQLAFVITEINNNLNNSSGYLGAISDRSKELYFNNETVGEYLWKQIAANPHTSLKNQVFYRQDYLDEFEQIWKTQSAFYPEILTDELKKELRDVVIFYQRKLKSQKSLVSFCEFENKEIEIKKEDGTSTKKVIGLKVAPKSSPLFQEFKIWQNLNNVLIRKKGSKTKKVAKNQQAVLFEEEKTISELDLEAKQALFNELNLKGNLKADYCLEILGYSPKEWEMNYSVLEGNRTNKALYEAYLKITDLEGYDAKNHLKVKLNKDEVELDDLKVPASEIKDMVQAIFKEAGINTDILHFNAELDGKDFENQASYQLWHLLYSYEGDDSKSGNELLYKLLETKFGFKKEYAQILANVSLSDDYGSLSTKAMRKIHPYIKENKFSTACELAGYRHSKHSLTKEENDNRVLKDSLEVLKKNSLRQPVVEKILNQMINLVNALLKKYRTENPNFKFDEIRIELARELKKNAEERANMTANINKAKTEHEKIIKILKNEFGLPNPTRNDIIRYRLYEELKANGYKDLYTNIKIPQEKLFTKEIDIEHIIPKSRVFDDSFSNKTLSFRKTNLDKGERTAFDYMESKFGADKLEEYVARVEDLYKNNIISKAKYQKLLKKESEIGDGFVERDLRETQYIAKKAKEILLQITPNVLSTSGGITDRLREDWDLINVMKELNLPKYRALGLTQMEDRKYGQQVEVITDWTKRNDHRHHAMDALTVAFTKHNHIQYLNYLNARKNEKHKEHSNIMGIQQLETIKVTDKNGNEKRVFKAPMPNFRQVTKAFLENILISHKAKNKVVTKNKNKVAGSNKVQEVLTPRGQLHKETVYGKYQYYVQKEEKIGAKFDLETIKKVANPLYQSLLKKRLEENGGDPKKAFTGKNSLAKNPIYLDDTQTEQLPEKVKLVWLENSFSIRKDITPENFKDEKLIDKILDEGVKRILKERLQSFGNDAKKAFSDLDKNPIWLNKEKGITIKRVTISGVANAEPLHTKKDHLGKEILDKEGKPIPVDFISTGSNHHVAVYRDEKGNLQEKVVSVFEAVVRANQGLPIIDKTYNQHLGWEFLFTMKQNEMFVFPNESTGFNPNDIDLLDPKNKRIISPNLFRVQKFSKLQYGNSFVREFVFRHHLETTVEDRKELQGITYKQMKNSTFFNDIIKVRINHLGDIVSIGEY

SEQ ID NO: 94 - protein, 1420 aa, Bifidobacterium bifidum
MSRKNYVDDYAISLDIGNASVGWSAFTPNYRLVRAKGHELIGVRLFDPADTAESRRMARTTRRRYSRRRWRLRLLDALFDQALSEIDPSFLARRKYSWVHPDDENNADCWYGSVLFDSNEQDKRFYEKYPTIYHLRKALMEDDSQHDIREIYLAIHHMVKYRGNFLVEGTLESSNAFKEDELLKLLGRITRYEMSEGEQNSDIEQDDENKLVAPANGQLADALCATRGSRSMRVDNALEALSAVNDLSREQRAIVKAIFAGLEGNKLDLAKIFVSKEFSSENKKILGIYFNKSDYEEKCVQIVDSGLLDDEEREFLDRMQGQYNAIALKQLLGRSTSVSDSKCASYDAHRANWNLIKLQLRTKENEKDINENYGILVGWKIDSGQRKSVRGESAYENMRKKANVFFKKMIETSDLSETDKNRLIHDIEEDKLFPIQRDSDNGVIPHQLHQNELKQIIKKQGKYYPFLLDAFEKDGKQINKIEGLLTFRVPYFVGPLVVPEDLQKSDNSENHWMVRKKKGEITPWNFDEMVDKDASGRKFIERLVGTDSYLLGEPTLPKNSLLYQEYEVLNELNNVRLSVRTGNHWNDKRRMRLGREEKTLLCQRLFMKGQTVTKRTAENLLRKEYGRTYELSGLSDESKFTSSLSTYGKMCRIFGEKYVNEHRDLMEKIVELQTVFEDKETLLHQLRQLEGISEADCALLVNTHYTGWGRLSRKLLTTKAGECKISDDFAPRKHSIIEIMRAEDRNLMEIITDKQLGFSDWIEQENLGAENGSSLMEVVDDLRVSPKVKRGIIQSIRLIDDISKAVGKRPSRIFLELADDIQPSGRTISRKSRLQDLYRNANLGKEFKGIADELNACSDKDLQDDRLFLYYTQLGKDMYTGEELDLDRLSSAYDIDHIIPQAVTQNDSIDNRVLVARAENARKTDSFTYMPQIADRMRNFWQILLDNGLISRVKFERLTRQNEFSEREKERFVQRSLVETRQIMKNVATLMRQRYGNSAAVIGLNAELTKEMHRYLGFSHKNRDINDYHHAQDALCVGIAGQFAANRGFFADGEVSDGAQNSYNQYLRDYLRGYREKLSAEDRKQGRAFGFIVGSMRSQDEQKRVNPRTGEVVWSEEDKDYLRKVMNYRKMLVTQKVGDDFGALYDETRYAATDPKGIKGIPFDGAKQDTSLYGGFSSAKPAYAVLIESKGKTRLVNVTMQEYSLLGDRPSDDELRKVLAKKKSEYAKANILLRHVPKMQLIRYGGGLMVIKSAGELNNAQQLWLPYEEYCYFDDLSQGKGSLEKDDLKKLLDSILGSVQCLYPWHRFTEEELADLHVAFDKLPEDEKKNVITGIVSALHADAKTANLSIVGMTGSWRRMNNKSGYTFSDEDEFIFQSPSGLFEKRVTVGELKRKAKKEVNSKYRTNEKRLPTLSGASQP

SEQ ID NO: 95 - protein, 1138 aa, Bifidobacterium dentium
MLCRCHRRYRIGIDVGLMSVGLAAIEVDETGFPIRILNIQSVIHDGGIDPQLGKKKSISRKAISGVARRTRRMRRRKVVRLRQLDATLESLGFPIVEPDSLDTWEIWLTRAKLASSYIQDDETRKEDVSIALRHIARHRGWRNPYSNVESLFVDVAPSEQYEELRRKAEEKLGTSLSGNPTSAEIVECILKRQVGEVQLRTRSRKGVNGNAVEKEGLLPTKLMQSDNAAEIRRIFKVQRIDDETGRKLLRAVFKACSPKGSVERRVGRDALAPGLPRALKASLAFQEYRIANVLTNLVISEDGTKRKLTIAEKQRVFGFLSSNETDDITWIDVAEKLGLERRQIQGVGCLTADGEERISSTPPRNITALHIHSAKPVIREKLVAWWKAASPTVRETMVELLSNTVDIDRVREDMDYSSAVAFIDSLGDEELTALDSVDLLSGRAAYSRQTLKQLTERMLNTDDDLHEARKAVFGVDDNWKPPVDAISTSVGNPAVDRVLKIVNRYLLACQKRWRNPQSVQIEHVRESFSSVAKAKETERVQGERARYRNDLRRELCEQEGLNKIRESDIRRWESVQRQNGTCLYCGSPITFRTCEMDHIVPRKGVGSTNTRVNLAAACAACNKLKSNTAFSVWARTEGAANRKVSQRDAIERVKTFIFNKSVPPREQRAFKQAVISRLRQAESDPAIDNRSIESVAWMADELHRRIEAYFNQDADVSGNTPATQVWVFQGRVTALARKASGIEGRIHFAGEWKKTRLDRRHHAVDAAVIAMMNHSAAQTLVERDSLRLSQWITRKPETWKNYPFSEGQKKTRFKEWLDCMNALLDLLNDALDSDRVPVTRCQRMSLGNSQAHAATIRKMKRVELFSPMDADLIRRASTPALYCALTRLPEYSPEKGLPENRGREIVLNGRHIRSTETVDFFASGAAQLMVRNGSAEIGDSIHHMRIYRYRKTGAKSQEYVYGMIRVFQIDLLHASSENLFAVQLPSQSVSVRYGDKNVVQAIQEGRAEYLGHIVPNDEILISYEGVRMKDSEKIGAYANDFSGTASELAQRRHWVVVGSDVSKLALRPSYLSEEGLENSGSESERLSKQTRKVIEGKGWVVAVNILAKYHPVVIRRNALGEPRFRTNSGMPVSWRWDR

SEQ ID NO: 96 - protein, 1187 aa, Bifidobacterium longum
MLSRQLLGASHLARPVSYSYNVQDNDVHCSYGERCFMRGKRYRIGIDVGLNSVGLAAVEVSDENSPVRLLNAQSVIHDGGVDPQKNKEAITRKNMSGVARRTRRMRRRKRERLHKLDMLLGKFGYPVIEPESLDKPFEEWHVRAELATRYIEDDELRRESISIALRHMARHRGWRNPYRQVDSLISDNPYSKQYGELKEKAKAYNDDATAAEEESTPAQLVVAMLDAGYAEAPRLRWRTGSKKPDAEGYLPVRLMQEDNANELKQIFRVQRVPADEWKPLFRSVFYAVSPKGSAEQRVGQDPLAPEQARALKASLAFQEYRIANVITNLRIKDASAELRKLTVDEKQSIYDQLVSPSSEDITWSDLCDFLGFKRSQLKGVGSLTEDGEERISSRPPRLTSVQRIYESDNKIRKPLVAWWKSASDNEHEAMIRLLSNTVDIDKVREDVAYASAIEFIDGLDDDALTKLDSVDLPSGRAAYSVETLQKLTRQMLTTDDDLHEARKTLFNVTDSWRPPADPIGEPLGNPSVDRVLKNVNRYLMNCQQRWGNPVSVNIEHVRSSFSSVAFARKDKREYEKNNEKRSIFRSSLSEQLRADEQMEKVRESDLRRLEAIQRQNGQCLYCGRTITFRTCEMDHIVPRKGVGSTNTRTNFAAVCAECNRMKSNTPFAIWARSEDAQTRGVSLAEAKKRVTMFTFNPKSYAPREVKAFKQAVIARLQQTEDDAAIDNRSIESVAWMADELHRRIDWYFNAKQYVNSASIDDAEAETMKTTVSVFQGRVTASARRAAGIEGKIHFIGQQSKTRLDRRHHAVDASVIAMMNTAAAQTLMERESLRESQRLIGLMPGERSWKEYPYEGTSRYESFHLWLDNMDVLLELLNDALDNDRIAVMQSQRYVLGNSIAHDATIHPLEKVPLGSAMSADLIRRASTPALWCALTRLPDYDEKEGLPEDSHREIRVHDTRYSADDEMGFFASQAAQIAVQEGSADIGSAIHHARVYRCWKTNAKGVRKYFYGMIRVFQTDLLRACHDDLFTVPLPPQSISMRYGEPRVVQALQSGNAQYLGSLVVGDEIEMDFSSLDVDGQIGEYLQFFSQFSGGNLAWKHWVVDGFFNQTQLRIRPRYLAAEGLAKAFSDDVVPDGVQKIVTKQGWLPPVNTASKTAVRIVRRNAFGEPRLSSAHHMPCSWQWRHE

SEQ ID NO: 97 - protein, 1124 aa, Bifidobacterium longum
  Bifidobacterium longum subsp. longum 2-2B
LTGHSGHTFWPTSSSPPIQLEQEKRPLPQRNTSQNGHTFWPITRERCFMRGKRYRIGIDVGLNSVGLAAVEVSDENSPVRLLNAQSVIHDGGVDPQKNKEAITRKNMSGVARRTRRMRRRKRERLHKLDMLLGKFGYPVIEPESLDKPFEEWHVRAELATRYIEDDELRRESISIALRHMARHRGWRNPYRQVDSLISDNPYSKQYGELKEKAKAYNDDATAAEEESTPAQLVVAMLDAGYAEAPRLRWRTGSKKPDAEGYLPVRLMQEDNANELKQIFRVQRVPADEWKPLFRSVFYAVSPKGSAEQRVGQDPLAPEQARALKASLAFQEYRIANVITNLRIKDASAELRKLTVDEKQSIYDQLVSPSSEDITWSDLCDFLGFKRSQLKGVGSLTEDGEERISSRPPRLTSVQRIYESDNKIRKPLVAWWKSASDNEHEAMIRLLSNTVDIDKVREDVAYASAIEFIDGLDDDALTKLDSVDLPSGRAAYSVETLQKLTRQMLTTDDDLHEARKTLFNVTDSWRPPADPIGEPLGNPSVDRVLKNVNRYLMNCQQRWGNPVSVNIEHVRSSFSSVAFARKDKREYEKNNEKRSIFRSSLSEQLRADEQMEKVRESDLRRLEAIQRQNGQCLYCGRTITFRTCEMDHIVPRKGVGSTNTRTNFAAVCAECNRMKSNTPFAIWARSEDAQTRGVSLAEAKKRVTMFTFNPKSYAPREVKAFKQAVIARLQQTEDDAAIDNRSIESVAWMADELHRRIDWYFNAKQYVNSASIDDAEAETMKTTVSVFQGRVTASARRAAGIEGKIHFIGQQSKTRLDRRHHAVDASVIAMMNTAAAQTLMERESLRESQRLIGLMPGERSWKEYPYEGTSRYESFHLWLDNMDVLLELLNDALDNDRIAVMQSQRYVLGNSIAHDATIHPLEKVPLGSAMSADLIRRASTPALWCALTRLPDYDEKEGLPEDSHREIRVHDTRYSADDEMGFFASQAAQIAVQEGSADIGSAIHHARVYRCWKTNAKGVRKYFYGMIRVFQTDLLRACHDDLFTVPLPPQSISMRYGEPRVVQALQSGNAQYLGSLVVGDEIEMDFPVSMLMVRLASIYNSSRSLVEGTLHGNIGLLMDSLTRRS

SEQ ID NO: 98 - protein, 1138 aa, Bifidobacterium sp.
MNSVGLAAVEVSDENSPVRLLNAQSVIHDGGVDPQKNKEAITRKNMSGVARRTRRMRRRKRERLHKLDMLLGKFGYPVIEPESLDKPFEEWHVRAELATRYIEDDELRRESISIALRHMARHRGWRNPYRQVDSLISDNPYSKQYGELKEKAKAYNDDATAAEEESTPAQLVVAMLDAGYAEAPRLRWRTGSKKPDAEGYLPVRLMQEDNANELKQIFRVQRVPADEWKPLFRSVFYAVSPKGSAEQRVGQDPLAPEQARALKASLAFQEYRIANVITNLRIKDASAELRKLTVDEKQSIYDQLVSPSSEDITWSDLCDFLGFKRSQLKGVGSLTEDGEERISSRPPRLTSVQRIYESDNKIRKPLVAWWKSASDNEHEAMIRLLSNTVDIDKVREDVAYASAIEFIDGLDDDALTKLDSVDLPSGRAAYSVETLQKLTRQMLTTDDDLHEARKTLFNVTDSWRPPADPIGEPLGNPSVDRVLKNVNRYLMNCQQRWGNPVSVNIEHVRSSFSSVAFARKDKREYEKNNEKRSIFRSSLSEQLRADEQMEKVRESDLRRLEAIQRQNGQCLYCGRTITFRTCEMDHIVPRKGVGSTNTRTNFAAVCAECNRMKSNTPFAIWARSEDAQTRGVSLAEAKKRVTMFTFNPKSYAPREVKAFKQAVIARLQQTEDDAAIDNRSIESVAWMADELHRRIDWYFNAKQYVNSASIDDAEAETMKTTVSVFQGRVTASARRAAGIEGKIHFIGQQSKTRLDRRHHAVDASVIAMMNTAAAQTLMERESLRESQRLIGLMPGERSWKEYPYEGTSRYESFHLWLDNMDVLLELLNDALDNDRIAVMQSQRYVLGNSIAHDATIHPLEKVPLGSAMSADLIRRASTPALWCALTRLPDYDEKEGLPEDSHREIRVHDTRYSADDEMGFFASQAAQIAVQEGSADIGSAIHHARVYRCWKTNAKGVRKYFYGMIRVFQTDLLRACHDDLFTVPLPPQSISMRYGEPRVVQALQSGNAQYLGSLVVGDEIEMDFSSLDVDGQIGEYLQFFSQFSGGNLAWKHWVVDGFFNQTQLRIRPRYLAAEGLAKAFSDDVVPDGVQKIVTKQGWLPPVNTASKTAVRIVRRNAFGEPRLSSAHHMPCSWQWRHE

SEQ ID NO: 99 - protein, 1151 aa, Bifidobacterium sp.
  Bifidobacterium sp. 12_1_47BFAA
MRGKRYRIGIDVGLNSVGLAAVEVSDENSPVRLLNAQSVIHDGGVDPQKNKEAITRKNMSGVARRTRRMRRRKRERLHKLDMLLGKFGYPVIEPESLDKPFEEWHVRAELATRYIEDDELRRESISIALRHMARHRGWRNPYRQVDSLISDNPYSKQYGELKEKAKAYNDDATAAEEESTPAQLVVAMLDAGYAEAPRLRWRTGSKKPDAEGYLPVRLMQEDNANELKQIFRVQRVPADEWKPLFRSVFYAVSPKGSAEQRVGQDPLAPEQARALKASLAFQEYRIANVITNLRIKDASAELRKLTVDEKQSIYDQLVSPSSEDITWSDLCDFLGFKRSQLKGVGSLTEDGEERISSRPPRLTSVQRIYESDNKIRKPLVAWWKSASDNEHEAMIRLLSNTVDIDKVREDVAYASAIEFIDGLDDDALTKLDSVDLPSGRAAYSVETLQKLTRQMLTTDDDLHEARKTLFNVTDSWRPPADPIGEPLGNPSVDRVLKNVNRYLMNCQQRWGNPVSVNIEHVRSSFSSVAFARKDKREYEKNNEKRSIFRSSLSEQLRADEQMEKVRESDLRRLEAIQRQNGQCLYCGRTITFRTCEMDHIVPRKGVGSTNTRTNFAAVCAECNRMKSNTPFAIWARSEDAQTRGVSLAEAKKRVTMFTFNPKSYAPREVKAFKQAVIARLQQTEDDAAIDNRSIESVAWMADELHRRIDWYFNAKQYVNSASIDDAEAETMKTTVSVFQGRVTASARRAAGIEGKIHFIGQQSKTRLDRRHHAVDASVIAMMNTAAAQTLMERESLRESQRLIGLMPGERSWKEYPYEGTSRYESFHLWLDNMDVLLELLNDALDNDRIAVMQSQRYVLGNSIAHDATIHPLEKVPLGSAMSADLIRRASTPALWCALTRLPDYDEKEGLPEDSHREIRVHDTRYSADDEMGFFASQAAQIAVQEGSADIGSAIHHARVYRCWKTNAKGVRKYFYGMIRVFQTDLLRACHDDLFTVPLPPQSISMRYGEPRVVQALQSGNAQYLGSLVVGDEIEMDFSSLDVDGQIGEYLQFFSQFSGGNLAWKHWVVDGFFNQTQLRIRPRYLAAEGLAKAFSDDVVPDGVQKIVTKQGWLPPVNTASKTAVRIVRRNAFGEPRLSSAHHMPCSWQWRHE

SEQ ID NO: 100 - protein, 1092 aa, Brevibacillus laterosporus
  Brevibacillus laterosporus GI-9
MAYTMGIDVGIASCGWAIVDLERQRIIDIGVRTFEKAENPKNGEALAVPRREARSSRRRLRRKKHRIERLKYMFVRNGLAVDIQHLEQTLRSQNEIDVWQLRVDGLDRMLTQKEWLRVLIHLAQRRGFQSNRKTDGSSEDGQVLVNVTENDRLMEEKDYRTVAEMMVKDEKFSDHKRNKNGNYHGVVSRASLLVEIHTLFESQRQHHNFLASKDFELEYINIWSSQRPVATKDQIEKMIGTCTFLPKEKRAPKASWHFQYFMLLQTINHIRITNAQGTRPLNKEEIEQVVNMALTKSKVSYHDIRKVLDLSEEYQFVGLDYGKEDEKKKVESKETIIKLDDYHKLNKIFNEVELAKGETWEAVDYDTVAYALTFFKDDEDIRDYLQNKYKDSKNRLVKNVANKEYTNELIEKVSTLSFRKVGHLSLKALRKIIPFLEQGMTYDKACQAAGFNFQGISKKKRSVVLPVIDQISNPVVNRALTQTRKVINALIKKYGSPETIHIETARELSKRFDERKNITKDYKENRDKNERAKKHLSELGIINPTGLDIVKYKLWCEQQGRCMYSNQPISFERLRESGYTEVDHIIPYSRSMNDSYNNRVLVMTRENREKSNQTPYEYMGNDTQRWDEFEQRVTTNPQIKKEKRQNLLLKGFTNRRELEMLERNLNDTRHITKYLSHFISTNLEFSPSDKKKKVVNTSGRITSHLRSRWGLEKNREQNDLHHAMDAVVIAVTSDSFIQQVTNYYKRKERRELNGDDKFPLPWKFFREEVIARLSPNPKEQIEALPNHFYSEDELADLQPIFVSRMPKRSITGEAHQAQFRRVVGKTKEGKNITAKKTALVDISYDKNGDFNMYGRETDPATYEAIKERYLEFGGNAKKAFSTDLHKPKKDGTKGPLIKSVRIMENKTLVHPVNKGKGVVYNSSIVRTDVFQRKEKYYLLPVYVTDVTKGKLPNKVIAAKKGYDDWIEVDDSFTFLYSLYPNDLIFIRQNPKKKISLKKRIESHSISDSKEVQEILTYYKGVDSSTAAIEFITHDGSYYAKGVGVQNLDCFEKYQVDILGNYSKVKGEKRLELETSDNNHKGKDVNSIKSTSR

SEQ ID NO: 101 - protein, 1428 aa, Burkholderiales bacterium
  Burkholderiales bacterium 1_1_47
MGKTHIIGVGLDLGGTYTGTFITSHPSDEAEHRDHSSAFTVVNSEKLSFSSKSRTAVRHRVRSYKGFDLRRRLLLLVAEYQLLQKKQTLAPEERENLRIALSGYLKRKGYARTEAETDTSVLESLDPSVFSSAPSFTNFFNDSEPLNIQWEAIANSPETTKALNKELSGQKEADFKKYIKTSFPEYSAKEILANYVEGRRAILDASKYIANLQSLGHKHRSKYLSDILQDMKRDSRITRLSEAFGSTDNLWRIIGNISNLQERAVRWYFNDAKFEQGQEQLDAVKLKNVLVRALKYLRSDDKEWSASQKQIIQSLEQSGDVLDVLAGLDPDRTIPPYEDQNNRRPPEDQTLYLNPKALSSEYGEKWKSWANKFAGAYPLLTEDLTEILKNTDRKSRIKIRSDVLPDSDYRLAYILQRAFDRSIALDECSIRRTAEDFENGVVIKNEKLEDVLSGHQLEEFLEFANRYYQETAKAKNGLWFPENALLERADLHPPMKNKILNVIVGQALGVSPAEGTDFIEEIWNSKVKGRSTVHSICNAIENERKTYGPYFSEDYKFVKTALKEGKTEKELSKKFAAVIKVLKMVSEVVPFIGKELRLSDEAQSKFDNPYSLAQLYNLIETERNGFSKVSLAAHLENAWRMTMTDGSAQCCRLPADCVRPFDGFIRKAIDRNSWEVAKRIAEEVKKSVDFTNGTVKIPVAIEANSFNFTASLTDLKYIQLKEQKLKKKLEDIQRNEENQEKRWLSKEERIRADSHGICAYTGRPLDDVGEIDHIIPRSLTLKKSESIYNSEVNLIFVSAQGNQEKKNNIYLLSNLAKNYLAAVFGASDLSQITNEIESTVLQLKAAGRLGYFDLLSEKERACARHALFLNSDSEARRAVIDVLGSRRKASVNGTQAWFVRSIFSKVRQALAAWTQETGNELIFDAISVPAADSSEMRKRFAEYRPEFRKPKVQPVASHSIDAMCIYLAACSDPFKTKRMGSQLAIYEPINFDNLFTGSCQVIQNTPRNFSDKTNIANSPIFKETIYAERFLDIIVSRGEIFIGYPSNMPFEEKPNRISIGGKDPFSILSVLGAYLDKAPSSEKEKLTIYRVVKNKAFELFSKVAGSKFTAEEDKAAKILEALHFVTVKQDVAATVSDLIKSKKELSKDSIENLAKQKGCLKKVEYSSKEFKFKGSLIIPAAVEWGKVLWNVFKENTAEELKDENALRKALEAAWPSSFGTRNLHSKAKRVFSLPVVATQSGAVRIRRKTAFGDFVYQSQDTNNLYSSFPVKNGKLDWSSPIIHPALQNRNLTAYGYRFVDHDRSISMSEFREVYNKDDLMRIELAQGTSSRRYLRVEMPGEKFLAWFGENSISLGSSFKFSVSEVFDNKIYTENAEFTKFLPKPREDNKHNGTIFFELVGPRVIFNYIVGGAASSLKEIFSEAGKERS

SEQ ID NO: 102 - protein, 1442 aa, Caenispirillum salinarum
  Caenispirillum salinarum AK4
MPVLSPLSPNAAQGRRRWSLALDIGEGSIGWAVAEVDAEGRVLQLTGTGVTLFPSAWSNENGTYVAHGAADRAVRGQQQRHDSRRRRLAGLARLCAPVLERSPEDLKDLTRTPPKADPRAIFFLRADAARRPLDGPELFRVLHHMAAHRGIRLAELQEVDPPPESDADDAAPAATEDEDGTRRAAADERAFRRLMAEHMHRHGTQPTCGEIMAGRLRETPAGAQPVTRARDGLRVGGGVAVPTRALIEQEFDAIRAIQAPRHPDLPWDSLRRLVLDQAPIAVPPATPCLFLEELRRRGETFQGRTITREAIDRGLTVDPLIQALRIRETVGNLRLHERITEPDGRQRYVPRAMPELGLSHGELTAPERDTLVRALMHDPDGLAAKDGRIPYTRLRKLIGYDNSPVCFAQERDTSGGGITVNPTDPLMARWIDGWVDLPLKARSLYVRDVVARGADSAALARLLAEGAHGVPPVAAAAVPAATAAILESDIMQPGRYSVCPWAAEAILDAWANAPTEGFYDVTRGLFGFAPGEIVLEDLRRARGALLAHLPRTMAAARTPNRAAQQRGPLPAYESVIPSQLITSLRRAHKGRAADWSAADPEERNPFLRTWTGNAATDHILNQVRKTANEVITKYGNRRGWDPLPSRITVELAREAKHGVIRRNEIAKENRENEGRRKKESAALDTFCQDNTVSWQAGGLPKERAALRLRLAQRQEFFCPYCAERPKLRATDLFSPAETEIDHVIERRMGGDGPDNLVLAHKDCNNAKGKKTPHEHAGDLLDSPALAALWQGWRKENADRLKGKGHKARTPREDKDFMDRVGWRFEEDARAKAEENQERRGRRMLHDTARATRLARLYLAAAVMPEDPAEIGAPPVETPPSPEDPTGYTAIYRTISRVQPVNGSVTHMLRQRLLQRDKNRDYQTHHAEDACLLLLAGPAVVQAFNTEAAQHGADAPDDRPVDLMPTSDAYHQQRRARALGRVPLATVDAALADIVMPESDRQDPETGRVHWRLTRAGRGLKRRIDDLTRNCVILSRPRRPSETGTPGALHNATHYGRREITVDGRTDTVVTQRMNARDLVALLDNAKIVPAARLDAAAPGDTILKEICTEIADRHDRVVDPEGTHARRWISARLAALVPAHAEAVARDIAELADLDALADADRTPEQEARRSALRQSPYLGRAISAKKADGRARAREQEILTRALLDPHWGPRGLRHLIMREARAPSLVRIRANKTDAFGRPVPDAAVWVKTDGNAVSQLWRLTSVVTDDGRRIPLPKPIEKRIEISNLEYARLNGLDEGAGVTGNNAPPRPLRQDIDRLTPLWRDHGTAPGGYLGTAVGELEDKARSALRGKAMRQTLTDAGITAEAGWRLDSEGAVCDLEVAKGDTVKKDGKTYKVGVITQGIFGMPVDAAGSAPRTPEDCEKFEEQYGIKPWKAKGIPLA

SEQ ID NO: 103 - protein, 984 aa, Campylobacter coli
  Campylobacter coli 1098
MARILAFDIGISSIGWAFSENDELKDCGVRIFTKAENPKTGESLALPRRLARSARKRLARRKARLNHLKHLIANEFKLNYEDYQSFDESLAKAYKGSLISPYELRFRALNELLSKQDFARVILHIAKRRGYDDIKNNGDEEKSEILKAIKQNEEKLVNYQSVGEYLYKEYFQKFKENSKEFINVRNKKESYERCIAQSFLKDELKLIFQKQREFGFSFSKKFEEEVLSVAFYKRALKDFSHLVGNCSFFTDEKRAPKNSPLAFMFVALTRIINLLNNLKNTEGILYTKDDLNALLNEVLKNGTLTYKQTKKLLGLSDDYEFKGEKGTYFIEFKKYKEFIKALGEHNLSQDDLNEIAKDITLIKDEIKLKKALAKYDLNQNQIDSLSKLEFKDHLNISFKALKLITPLMLEGKKYDEACNELNLKVAINEDKKDFLPAFNETYYKDEVTNPVVLRAIKEYRKVLNALLKKYGKVHKINIELAREVGKNYSQRAKIEKEQNENYKAKKDAELECEKLGLKINSKNILKLRLFKEQKEFCAYSGEKIKISDLQDEKMLEIDHIYPYSRSFDDSYMNKVLVFTKQNQEKLNQTPFEAFGNDSAKWQKIEVLAKNLPTKKQKRILDKNYKDKEQKNFKDRNLNDTRYIARLVLNYTKDYLDFLPLSDDENTKLNDTQKGSKVHVEAKSGMLTSALRHTWGFSAKDRNNHLHHAIDAVIIAYANNSIVKAFSDFKKEQESNSAELYAKKISELDYKNKRKFFEPFSGFRQKVLDKIDEIFVSKPERKKPSGALHEETFRKEEEFYQSYGGKEGVLKALELGKIRKVNGKIVKNGDMFRVDIFKHKKTNKFYAVPIYTMDFALKVLPNKAVARSKKGEIKDWILMDENYEFCFSLYKDSLILIQTKDMQEPEFVYYNAFTSSTVSLIVSKHDNKFETLSKNQKILFKNANEKEVIAKSIGIQNLKVFEKYIVSALGEVTKAEFRQREDFKK

SEQ ID NO: 104 - protein, 984 aa, Campylobacter coli
  Campylobacter coli 111-3
MARILAFDIGISSIGWAFSENDELKDCGVRIFTKAENPKTGESLALPRRLARSARKRLARRKARLNHLKHLIANEFKLNYEDYQSFDESLAKAYKGSLISPYELRFRALNELLSKQDFARVILHIAKRRGYDDIKNNGDEEKSEILKAIKQNEEKLVNYQSVGEYLYKEYFQKFKENSKEFINVRNKKESYERCIAQSFLKDELKLIFQKQREFGFSFSKKFEEEVLSVAFYKRALKDFSHLVGNCSFFTDEKRAPKNSPLAFMFVALTRIINLLNNLKNTEGILYTKDDLNTLLNEVLKNGTLTYKQTKKLLGLSDDYEFKGEKGTYFIEFKKYKEFIKALGEHNLSQDNLNEIAKDITLIKDEIKLKKALAKYDLNQNQIDSLSKLEFKDHLNISFKALKLITPLMLEGKKYDEAYNELNLKVAINEDKKDFLPAFNETYYKDEVTNPVVLRAIKEYRKVLNALLKKYGKVHKINIELAREVGKNHSQRAKIEKEQNENYKAKKDAELECEKLGLKINSKNILKLRLFKEQKEFCAYSGEKIKISDLQDEKMLEIDHIYPYSRSFDDSYMNKVLVFTKQNQEKLNQTPFEAFGNDSAKWQKIEVLAKNLPTKKQKRILDKNYKDKEQKDFKDRNLNDTRYIARLVLNYTKDYLDFLPLSDDENTKLNDTQKGSKVHVEAKSGMLTSALRHTWGFSAKDRNNHLHHAIDAVIIAYANNSIVKAFSDFKKEQESNSAELYAKKISELDYKNKRKFFEPFSGFRQKVLDKIDEIFVSKPERKKPSGALHEETFRKEEEFYQSYGGKEGVLKALELGKIRKVNGKIVKNGDMFRVDIFKHKKTNKFYAVPIYTMDFALKVLPNKAVARSKKGEIKDWILMDENYEFCFSLYKDSLILIQTKDMQEPELVYFNAFTSSTVSLIVSKHDNKFETLSKNQKILFKNANEKEVIAKSIGIQNLKVFEKYIVSALGEVTKAEFRQREDFKK

SEQ ID NO: 105 - protein, 987 aa, Campylobacter coli
  Campylobacter coli 132-6
MARILAFDIGISSIGWAFSENDELKDCGVRIFTKAENPKTGESLALPRRLARSARKRLARRKARLNHLKHLIANEFKLNYEDYQSFDESLAKAYKGSLISPYELRFRALNELLSKQDFARVILHIAKRRGYDDIKNNGDEEKSEILKAIKQNEEKLVNYQSVGEYLYKEYFQKFKENSKEFINVRNKKESYERCIAQSFLKDELKLIFQKQREFGFSFSKKFEEEVLSVAFYKRALKDFSHLVGNCSFFTDEKRAPKNSPLAFMFVALTRIINLLNNLKNTEGILYTKDDLNTLLNEVLKNGTLTYKQTKKLLGLSDDYEFKGEKGTYFIEFKKYKEFIKALGEHNLSQDNLNEIAKDITLIKDEIKLKKALAKYDLNQNQIDSLSKLEFKDHLNISFKALKLITPLMLEGKKYDEAYNELNLKVAINEDKKDFLPAFNETYYKDEVTNPVVLRAIKEYRKVLNALLKKYGKVHKINIELAREVGKNHSQRAKIEKEQNENYKAKKDAELECEKLGLKINSKNILKLRLFKEQKEFCAYSGEKIKISDLQDEKMLEIDHIYPYSRSFDDSYMNKVLVFTKQNQEKLNQTPFEAFGNDSAKWQKIEVLAKNLPTKKQKRILDKNYKDKEQKDFKDRNLNDTRYIARLVLNYTKDYLDFLPLSDDENTKLNDTQKGSKVHVEAKSGMLTSALRHTWGFSAKDRNNHLHHAIDAVIIAYANNSIVKAFSDFKKEQESNSAELYAKKISELDYKNKRKFFEPFSGFRQKVLDKIDEIFVSKPERKKPSGALHEETFRKEEEFYQSYGGKEGVLKALELGKIRKVNGKIVKNGDMFRVDIFKHKKTNKFYAVPIYTMDFALKVLPNKAVARSKKGEIKDWILMDENYEFCFSLYKDSLILIQTKDMQEPELVYFNAFTSSTVSLIVSKHDNKFETLSKNQKILFKNANEKEVIAKSIGIQNLKVFEKYIVSALGEVTKAEFRQREDFKNELR

SEQ ID NO: 106 - protein, 984 aa, Campylobacter coli
  Campylobacter coli 151-9
MARILAFDIGISSIGWAFSENDELKDCGVRIFTKAENPKTGESLALPRRLARSARKRLARRKARLNHLKHLIANEFKLNYEDYQSFDESLAKAYKGSLISPYELRFRALNELLSKQDFARVILHIAKRRGYDDIKNNGDEEKSEILKAIKQNEEKLVNYQSVGEYLYKEYFQKFKENSKEFINVRNKKESYERCIAQSFLKDELKLIFQKQREFGFSFSKKFEEEVLSVAFYKRALKDFSHLVGNCSFFTDEKRAPKNSPLAFMFVALTRIINLLNNLKNTEGILYTKDDLNTLLNEVLKNGTLTYKQTKKLLGLSDDYEFKGEKGTYFIEFKKYKEFIKALGEHNLSQDNLNEIAKDITLIKDEIKLKKALAKYDLNQNQIDSLSKLEFKDHLNISFKALKLITPLMLEGKKYDEAYNELNLKVAINEDKKDFLPAFNETYYKDEVTNPVVLRAIKEYRKVLNALLKKYGKVHKINIELAREVGKNHSQRAKIEKEQNENYKAKKDAELECEKLGLKINSKNILKLRLFKEQKEFCAYSGEKIKISDLQDEKMLEIDHIYPYSRSFDDSYMNKVLVFTKQNQEKLNQTPFEAFGNDSAKWQKIEVLAKNLPTKKQKRILDKNYKDKEQKDFKDRNLNDTRYIARLVLNYTKDYLDFLPLSNDENTKLNDTQKGSKVHVEAKSGMLTSALRHTWGFSAKDRNNHLHHAIDAVIIAYANNSIVKAFSDFKKEQESNSAELYAKKISELDYKNKRKFFEPFSGFRQKVLDKIDEIFVSKPERKKPSGALHEETFRKEEEFYQSYGGKEGVLKALELGKIRKVNGKIVKNGDMFRVDIFKHKKTNKFYAVPIYTMDFALKVLPNKAVARSKKGEIKDWILMDENYEFCFSLYKDSLILIQTKDMQEPELVYFNAFTSSTVSLIVSKHDNKFETLSKNQKILFKNANEKEVIAKSIGIQNLKVFEKYIVSALGEVTKAEFRQREDFKK

SEQ ID NO: 107 - protein, 984 aa, Campylobacter coli
  Campylobacter coli 1909
MARILAFDIGISSIGWAFSENDELKDCGVRIFTKAENPKTGESLALPRRLARSARKCLARRKARLNHLKHLIANEFKLNYEDYQSFDESLAKAYKGSLISPYELRFRALNELLSKQDFARVILHIAKRRGYDDIKNNGDEEKSEILKAIKQNEEKLVNYQSVGEYLYKEYFQKFKENSKEFINVRNKKESYERCIAQSFLKDELKLIFQKQREFGFSFSKKFEEEVLSVAFYKRALKDFSHLVGNCSFFTDEKRAPKNSPLAFMFVALTRIINLLNNLKNTEGILYTKDDLNALLNEVLKNGTLTYKQTKKLLGLSDDYEFKGEKGTYFIEFKKYKEFIKALGEHNLSQDDLNEIAKDITLIKDEIKLKKALAKYDLNQNQIDSLSKLEFKDHLNISFKALKLITPLMLEGKKYDEACNELNLKVAINEDKKDFLPAFNETYYKDEVTNPVVLRAIKEYRKVLNALLKKYGKVHKINIELAREVGKNHSQRAKIEKEQNENYKAKKDAELECEKLGLKINSKNILKLRLFKEQKEFCAYSGEKIKISDLQDEKMLEIDHIYPYSRSFDDSYMNKVLVFTKQNQEKLNQTPFEAFGNDSAKWQKIEVLAKNLPTKKQKRILDKNYKDKEQKNFKDRNLNDTRYIARLVLNYTKDYLDFLPLSDDENTKLNDTQKGSKVHVEAKSGMLTSALRHTWGFSAKDRNNHLHHAIDAVIIAYANNSIVKAFSDFKKEQESNSAELYAKKISELDYKNKRKFFEPFSGFRQKVLDKIDEIFVSKPERKKPSGALHEETFRKEEEFYQSYGGKEGVLKALELGKIRKVNGKIVKNGDMFRVDIFKHKKTNKFYAVPIYTMDFALKVLPNKAVARSKKGEIKDWILMDENYEFCFSLYKDSLILIQTKDMQEPEFVYYNAFTSSTVSLIVSKHDNKFETLSKNQKILFKNANEKEVIAKSIGIQNLKVFEKYIVSALGEVTKAEFRQREDFKK

SEQ ID NO: 108 - protein, 965 aa, Campylobacter coli
  Campylobacter coli 1957
MKIIGFNLGIANIGWALRENDEIIDCGVRVFDIPENPKNGNSLALERRENKARMKIVKRKKARMLATKTFLKKELNVDLSKLFLIGSTQSIYELRTKALSSLISKEELSAIILHIAKHRGYDDSALKNENGTIIEALNKNKEAMLKFKSVGEYFYKNFVQNKEVKKIRNTTEDYSNSVPRSLLKQELDLILDKQKELGLIKNADFKEKLFEIIFFKRPLKDFSNKIGNCIFFENEKRAAKNTISACEFVALGKVVNLLKSIEKDIGIVYEKDSINEIMSIILDKTSISYKKIRDILNLPQDINFKGLDYSKNNAENSKLVDLKKLNEFKKALGDGFANLDKDILDSIATDITLTKDTATLKEKLKNYNVLNAEQIEKLSELVFNDHINLSLKALKQIIPLMYEGKRYDEACELCNFTIAKNQEKNEYLPLFEKTRFAKDISSPVVIRAICEFRKLLNDIIRRYGSVHKIHLELTRDFGISFNDRKKIIKEIEQNEQSRIKALETIKELKLEETSKNIQIVRLFEDQKGICPYSGLKMDLKCLDELVIDYIRPYNRSLDDSYSNKILTFKKLNDLKQGKTPFEAFGEDEKLWAEINERIKEYNGKKRFKIFDKFFKDKKPFDFTEQTLQDTRWLTKLVASYLNEYLLFLPINEDENTALGYGEKGSKQHVVLSSGMITQMLRNFWYLGFKNHKDYKNNAMDAIIVAFTTNSIIFAFNNFKKELDLAKAEFYANKISESDYLLKRKFLPPFSGFKEQALEKVKNIFVSHSLKIKNKGTLHELTPLKIKELKNTYGDLDLAVKLGKIRKYNDKYYANAKGSLVRTDLFADKENKFHAVSIYKADFSTKKLPNKTPATTSNGETKEGIEMNENYNFCMSLYKNTPISVKIKGMKEPIICYYHGFNTSGSKITYKKHDNNYHNLSEDEMVVFRKNDKESIVVGKILEIKKYSISPSGELSLIENEERKWF

SEQ ID NO: 109 - protein, 984 aa, Campylobacter coli
  Campylobacter coli 2692
MARILAFDIGISSIGWAFSENDELKDCGVRIFTKAENPKTGESLALPRRLARSARKRLARRKARLNHLKHLIANEFKLNYEDYQSFDESLAKAYKGSLISPYELRFRALNELLSKQDFARVILHIAKRRGYDDIKNSDDKEKGAILKAIKQNEEKLTNYQSVGEYLYKEYFQKFKENSKEFTNVRNKKESYERCIAQSFLKDELKLIFKKQREFGFSFSKKFEEEVLSVAFYKRALKDFSHLVGNCSFFTDEKRAPKNSPLAFMFVALTRIINLLNNLKNTEGILYTKDDLNALLNEVLKNGTLTYKQTKKLLGLSDDYEFKGEKGTYFIEFKKYKEFIKALGDHSLSQDDLNEIAKDITLIKDEIKLKKALAKYDLNQNQIDSLSKLEFKDHLNISFKALKLITPLMLEGKKYDEACNELNLKVAINEDKKDFLPAFNETYYKDEVTNPVVLRAIKEYRKVLNALLKKYGKVHKINIELAREVGKNYSQRAKIEKEQNENYKAKKDAELECEKLGLKINSKNILKLRLFKEQKEFCAYSGEKIKISDLQDEKMLEIDHIYPYSRSFDDSYMNKVLVFTKQNQEKLNQTPFEAFGNDSAKWQKIEVLAKNLPTKKQKRILDKNYKDKEQKDFKDRNLNDTRYIARLVLNYTKDYLDFLPLSDDENTKLNDTQKGSKVHVEAKSGMLTSALRHTWGFSAKDRNNHLHHAIDAVIIAYANNSIVKAFSDFKKEQESNSAELYAKKISELDYKNKRKFFEPFSGFRQKVLDKIDEIFVSKPERKKPSGALHEETFRKEEEFYQSYGGKEGVLKALELGKIRKVNGKIVKNGDMFRVDIFKHKKTNKFYAVPIYTMDFALKVLPNKAVARSKKGEIKDWILMDENYEFCFSLYKDSLILIQTKDMQEPEFVYYNAFTSSTVSLIVSKHDNKFETLSKNQKILFKNANEKEVIAKSIGIQNLKVFEKYIVSALGEVTKAEFRQREDFKK

SEQ ID NO: 110 - protein, 984 aa, Campylobacter coli
  Campylobacter coli 59-2
MARILAFDIGISSIGWAFSENDELKDCGVRIFTKAENPKTGESLALPRRLARSARKRLARRKARLNHLKHLIANEFKLNYEDYQSFDESLAKAYKGSLISPYELRFRALNELLSKQDFARVILHIAKRRGYDDIKNNGDEEKGKILKAIKQNEEKLVNYQSVGEYLYKEYFQKFKENSKEFINVRNKKESYERCITQSFLKYELKLIFQKQREFGFSFSKKFEEEVLSVAFYKRALKDFSHLVGNCSFFSDEKRAPKNSPLAFMFVALTRIINLLNNLKNTEGILYTKDDLNALLNEVLKNGTLTYKQTKKLLGLSDDYEFKGEKGTYFIEFKKYKEFIKALGEHNLSQDDLNEIAKDITLIKDEIKLKKALAKYDLNQNQIDSLSKLEFKDHLNISFKALKLITPLMLEGKKYDEACNELNLKVAINEDKKDFLPAFNETYYKDEVTNPVVLRAIKEYRKVLNALLKKYGKVHKINIELAREVGKNYSQRAKIEKEQNENYKAKKDAELECEKLGLKINSKNILKLRLFKEQKEFCAYSGEKIKISDLQDEKMLEIDHIYPYSRSFDDSYMNKVLVFTKQNQEKLNQTPFEAFGNDSAKWQKIEVLAKNLPTKKQKRILDKNYKDKEQKNFKDRNLNDTRYIARLVLNYTKDYLDFLPLSDDENTKLNDTQKGSKVHVEAKSGMLTSALRHTWGFSAKDRNNHLHHAIDAVIIAYANNSIVKAFSDFKKEQESNSAELYAKKISELDYKNKRKFFEPFSGFRQKVLDKIDEIFVSKPERKKPSGALHEETFRKEEEFYQSYGGKEGVLKALELGKIRKVNGKIVKNGDMFRVDIFKHKKTNKFYAVPIYTMDFALKVLPNKAVARSKKGEIKDWILMDENYEFCFSLYKDSLILIQTKDMQEPEFVYYNAFTSSTVSLIVSKHDNKFETLSKNQKILFKNANEKEVIAKSIGIQNLKVFEKYIVSALGEVTKAEFRQREDFKK

SEQ ID NO: 111 - protein, 965 aa, Campylobacter coli
  Campylobacter coli 67-8
MKIIGFNLGIANIGWALRENDEIIDCGVRVFDIPENPKNGNSLALERRENKARMKIVKRKKARMLATKTFLKKELNVDLSKLFLIGSTQSIYELRTKALSSLISKEELSAIILHIAKHRGYDDSALKNENGTIIEALNKNKEAMLKFKSVGEYFYKNFVQNKEVKKIRNTTEDYSNSVPRSLLKQELDLILDKQKELGLIKNADFKAKLFEIIFFKRPLKDFSNKIGNCIFFENEKRAAKNTISACEFVALGKVVNLLKSIEKDIGIVYEKDSINEIMSIILDKTSISYKKIRDILNLPQDINFKGLDYSKNNAENSKLVDLKKLNEFKKALGDGFANLDKDILDSIATDITLTKDTATLKEKLKNYNVLNAEQIEKLSELVFNDHINLSLKALKQIIPLMYEGKRYDEACELCNFTIAKNQEKNEYLPLFEKTRFAKDISSPVVIRAICEFRKLLNDIIRRYGSVHKIHLELTRDFGISFNDRKKIIKEIEQNEQSRIKALETIKELKLEETSKNIQIVRLFEDQKGICPYSGLKMDLKCLDELVIDYIRPYNRSLDDSYSNKVLTFKKLNDLKQGKTPFEAFGEDEKLWAEINERIKEYNGKKRFKIFDKFFKDKKPFDFTEQTLQDTRWLTKLVASYLNEYLSFLPISEDENTALGYGEKGSKQHVVLSSGMITQMLRNFWYLGFKNHKNYKNNAMDAIIVAFTTNSIIFAFNNFKKELDLAKAEFYANKISESDYLLKRKFLPPFSGFKEQALEKVKNIFVSHSLKIKNKGTLHELTPLKIKELKNTYGDLDLAVKLGKIRKYNDKYYANTKGSLVRTDLFVDKENKFHAVSIYKADFSTKKLPNKTPATTSNGETKEGIEMNENYNFCMSLYKNTPVSVKIKGMKEPIICYYHGFNTSGSKITYKKHDNNYHNLSEDEMVVFRKNDKESIVVGKILEIKKYSISPSGELSLIENEKRKWF

SEQ ID NO: 112 - protein, 965 aa, Campylobacter coli
  Campylobacter coli 80352
MKIIGFNLGIANIGWALRENDEIIDCGVRVFDIPENPKNGNSLALERRENKARMKIVKRKKARMLATKTFLKKELNVDLSKLFLIGSTQSIYELRTKALSSLISKEELSAIILHIAKHRGYDDSALKNENGTIIEALNKNKEAMLKFKSVGEYFYKNFVQNKEVKKIRNTTEDYSNSVPRSLLKQELDLILDKQKELGLIKNADFKAKLFEIIFFKRPLKDFSNKIGNCIFFENEKRAAKNTISACEFVALGKVVNLLKSIEKDIGIVYEKDSINEIMSIILDKTSISYKKIRDILNLPQDINFKGLDYSKNNVENSKLVDLKKLNEFKKALGDGFTNLDKDILDSIATDITLTKDTATLKEKLKNYNVLNAEQIEKLSELVFNDHINLSLKALKQIIPLMYEGKRYDEACELCNFTIAKNQEKNEYLPLFEKTRFAKDISSPVVIRAICEFRKLLNDIIRRYGSVHKIHLELTRDFGISFNDRKKIIKEIEQNEQSRIKALETIKELKLEETSKNIQIVRLFEDQKGICPYSGLKMDLKCLDELVIDYIRPYNRSLDDSYSNKVLTFKKLNDLKQGKTPFEAFGEDEKLWAEINERIKEYNGKKRFKIFDKFFKDKKPFDFTEQTLQDTRWLTKLVASYLNEYLSFLPISEDENTALGYGEKGSKQHVILSSGMITQMLRNFWYLGFKNHKDYKNNAMDAIIVAFTTNSIIFTFNNFKKELDLAKAEFYANKISESDYLLKRKFLPPFSGFKEQALEKVKNIFVSHSLKIKNKGTLHELTPLKIKELKNTYGDLDLAVKLGKIRKYNDKYYANAKGSLVRTDLFADKENKFHAVSIYKADFSTKKLPNKTPATTSNGETKEGIEMNENYNFCMSLYKNTPISVKIKGMKEPIICYYHGFNTSGSKITYKKHDNNYHNLSEDEMVVFRKNDKESIVVGKILEIKKYSISPSGELSLIENEERKWF

SEQ ID NO: 113 - protein, 987 aa, Campylobacter coli
  Campylobacter coli 80352
MARILAFDIGISSIGWAFSENDELKDCGVRIFTKAENPKTGESLALPRRLARSARKRLARRKARLNHLKHLIANEFKLNYEDYQSFDESLAKAYKGSLISPYELRFRALNELLSKQDFARVILHIAKRRGYDDIKNSDDKEKGAILKAIKQNEEKLANYQSVGEYLYKEYFQKFKENSKEFTNVRNKKESYERCIAQSFLKDELKLIFKKQREFGFSFSKKFEEEVLSVAFYKRALKDFSHLVGNCSFFTDEKRAPKNSPLAFMFVALTRIINLLNNLKNTEGILYTKDDLNALLNEVLKNGTLTYKQTKKLLGLSDDYEFKGEKGTYFIEFKKYKEFIKALGDHSLSQDDLNEIAKDITLIKDEIKLKKALAKYDLNQNQIDSLSKLEFKDHLNISFKALKLITPLMLEGKKYDEACNELNLKVAINEDKKDFLPAFNETYYKDEVTNPVVLRAIKEYRKVLNALLKKYGKVHKINIELAREVGKNYSQRAKIEKEQNENYKAKKDAELECEKLGLKINSKNILKLRLFKEQKEFCAYSGEKIKISDLQDEKMLEIDHIYPYSRSFDDSYMNKVLVFTKQNQEKLNKTPFEAFGNDSTKWQKIEVLAKNLPEKKQKRILDKNYKDKEQKDFKDRNLNDTRYIARLVLNYTKDYLDFLPLSDDENTKLNDTQKGSKVHVEAKSGMLTSALRHTWGFSTKDRNNHLHHAIDAVIIAYANNSIVKAFSDFKKEQESNSAELYAKKISELDYKNKRKFFEPFSGFRQKVLDKIDEIFVSKPERKKPSGALHEETFRKEEEFYQSYGGKEGVLKALELGKIRKVNGKIVKNGDMFRVDIFKHKKTNKFYAVPIYTMDFALKVLPNKAVARSKKGEIKDWILMDENYEFCFSLYKDSLILIQTKDMQEPEFVYYNAFTSSTVSLIVSKHDNKFETLSKNQKILFKNANEKEVIAKSIGIQNLKVFEKYIVSALGEVTKAEFRQREDFKNELR

SEQ ID NO: 114 - protein, 984 aa, Campylobacter jejuni
MAKILAFDIGISSIGWAFSENDELKDCGVRIFTKAENPKTGESLALPRRIARSARKRLARRKARLNHLKHLIANEFKLNYEDYQSFDEILAKAYKGSLISPYELRFRALNELLSKQDFARVILHIAKRRGYDDIKNNGDEEKGKILKAIKQNEEKLANYQSVGEYLYKEYFQKFKENSKEFINVRNKKESYERCIAQSFLKDELKLIFKKQREFGFSFSKKFEEEVLSVAFYKRALKDFSHLVGNCSFFTDEKRAPKNSPLAFMFVALTRIINLLNNLKNTLYTKDDLNALLNEVLKNGTLTYKQTKKLLGLSDDYEFKGEKGNYFIEFKKYKEFIKALGEHSLSQDDLNEIAKDITLIKDEIKLKKALAKYDLNENQIDNLSKLEFKDHLNISFKALKLITPLMLEGKKYDEACNELTLKVAINEDKKDFLPAFNETYYKDEVTNPVVLRAIKEYRKVLNALLKKYGKVHKINIELAREVGKNHSQRAKIEKEQNENYKAKKDAELECEKLGLKINSKNILKLRLFKEQKEFCVYSGEKIKLSDLQDEKMLEIDHIYPYSRSFDDSYMNKVLVFTKQNQEKLNQTPFEAFGNDSAKWQKIEVLAKNLPTKKQKRILDKNYKDKEQKDFKDRNLNDTRYIARLVLNYTKDYLDFLPLSDDENTKLNDTQKGSKVHVEAKSGMLTSALRHTWGFSTKDRNNHLHHAIDAVIIAYANNSIVKAFSDFKKEQESNTAELYAKKISELDYKNKRKFFEPFSGFRQKVLDKIDEIFVSKPERKKPSGALHEETFRKEEEFYQSYGGKEGVLKALELGKIRKVNGKIVKNGDMFRVDIFKHKKTNKFYAVPIYTMDFALKVLPNKAVARSKKGEIKDWILMDENYEFCFSLYKDSLILIQTKDMQEPEFVYYNAFTSSTVSLIVSKHDNKFETLSKNQKILFKNANEKEVIAKSIGIQNLKVFEKYIVSALGEVTKAEFRQREEFKNELR

SEQ ID NO: 115 - protein, 987 aa, Campylobacter jejuni
  Campylobacter jejuni subsp. jejuni 110-21
MARILAFDIGISSIGWAFSENDELKDCGVRIFTKAENPKTGESLALPRRLARSARKRLARRKARLNHLKHLIANEFKLNYEDYQSFDESLAKAYKGSLISPYELRFRALNELLSKQDFARVILHIAKRRGYDNIKNSDNEEKSEILKAIKQNEEKLVNYQSVGEYLYKEYFQKFKENSKEFINVRNKKESYERCIAQSFLKDELKLIFQKQREFGLSFSKKFEEEVLSVAFYKRALKDFSHLVGNCSFFTDEKRAPKNSPLAFMFVALTRIINLLNNLKNTEGILYTKDDLNTLLNEVLKNGTLTYKQTKKLLGLSDDYEFKGEKGTYFIEFKKYKEFIKALGDHSLSQDDLNEIAKDITLIKDEIKLKKALAKYDLNQNQIDSLSKLEFKDHLNISFKALKLITPLMLEGKKYDEACNELNLKVVINEDKKDFLPAFNETYYKDEVTNPVVLRAIKEYRKVLNALLKKYGKVHKINIELAREVGKNHSQRAKIEKEQNENYKAKKDAELECEKLGLKINNKNILKLRLFKEQKEFCAYSGEKIKLSDLQDEKMLEIDHIYPYSRSFDDSYMNKVLVFTKQNQEKLNKTPFEAFGNDSTKWQKIEVLAKNLPTKKQKRILDKNYKDKEQKDFKDRNLNDTRYIARLVLNYTKDYLDFLPLSDDENTKLNDIQKGSKVHVEAKSGMLTSALRHTWGFSTKDRNNHLHHAIDAVIIAYANNSIVKAFSDFKKEQESNSAELYAKKISELDYKNKRKFFEPFSGFRQKVLDKIDEIFVSKPERKKPSGALHEETFRKEEEFYQSYGGKEGVLKALELGKIRKVNGKIVKNGDMFRVDIFKHKKTNKFYAVPIYTMDFALKVLPNKAVVQGKDKKSGLIKDWILMDENYEFCFSLYKDSLILIQTKDMQEPEFVYYNAFTSSTVSLIVSKHDNKFETLSKNQKILFKNANEKEVIAKSIGIQNLKVFEKYIVSALGEVTKAEFRQREDFKK

SEQ ID NO: 116 - protein, 987 aa, Campylobacter jejuni
  Campylobacter jejuni subsp. jejuni 129-258
MARILAFDIGISSIGWAFSENDELKDCGVRIFTKAENPKTGESLALPRRLARSARKRLARRKARLNHLKHLIANEFKLNYEDYQSFNESLAKAYKGSLISPYELRFRALNELLSKQDFARVILHIAKRRGYDDIKNSDDKEKGAILKVIKQNEEKLANYQSVGEYLYKEYFQKFKENSKEFTNVRNKKESYERCIAQSFLKDELKLIFQKQREFGFSFSKKFEEEVLSVAFYKRALKDFSHLVGNCSFFTDEKRAPKNSPLAFMFVALTRIINLLNNLKNTEGILYTKDDLNALLNEVLKNGTLTYKQTKKLLGLSDDYEFKGEKGTYFIEFKKYKEFIKALGDHSLSQDDLNEIAKDITLIKDEIKLKKALAKYDLNQNQIDSLSKLEFKDHLNISFKALKLITPLMLEGKKYDEACNELNLKVAINEDKKDFLPAFNETYYKDEVTNPVVLRAIKEYRKVLNALLKKYGKVHKINIELAREVGKNYSQRAKIEKEQNENYKAKKDAELECEKLGLKINSKNILKLRLFKEQKEFCAYSGEKIKISDLQDEKMLEIDHIYPYSRSFDDSYMNKVLVFTKQNQEKLNQTPFEAFGNDSAKWQKIEVLAKNLPTKKQKRILDKNYKDKEQKDFKDRNLNDTRYIARLVLNYTKDYLDFLPLSDDENTKLNDTQKGSKVHVEAKSGMLTSALRHTWGFSAKDRNNHLHHAIDAVIIAYANNSIVKAFSDFKKEQESNSAELYAKKISELDYKNKRKFFEPFSGFRQKVLDKIDEIFVSKPERKKPSGALHEETFRKEEEFYQSYGGKEGVLKALELGKIRKVNGKIVKNGDMFRVDIFKHKKTNKFYAVPIYTMDFALKVLPNKAVARSKKGEIKDWILMDENYEFCFSLYKDSLILIQTKDMQEPELVYFNAFTSSTVSLIVSKHDNKFETLSKNQKILFKNANEKEVIAKSIGIQNLKVFEKYIVSALGEVTKAEFRQREDFKNELR

SEQ ID NO: 117 - protein, 987 aa, Campylobacter jejuni
  Campylobacter jejuni subsp. jejuni 1336
MARILAFDIGISSIGWAFSENDELKDCGVRIFTKAENPKTGESLALPRRLARSARKRLARRKARLNHLKHLIANEFKLNYEDYQSFDESLAKAYKGSLISPYELRFRALNELLSKQDFARVILHIAKRRGYDDIKNNGDEEKGKILKAIKQNEEKLVSYQSVGEYLYKEYFQKFKENSKEFINVRNKKESYERCIAQSFLKDELKLIFQKQREFGFSFSKKFEEEVLSVAFYKRALKDFSHLVGNCSFLLMKKERQKNSPLAFMFVALTRIINLLNNLKNTEGILYTKDDLNTLLNEALKNGTLTYKQTKKLLGLSNDYEFKGEKGTYFIEFQKYKEFVKALGEHNLSQDDLNEIAKDITLIKDEIKLKKALAKYDLNQNQIDSLSKLEFKDHLNISFKALKLITPLMLEGKKYDEACNELNLKVAINEDKKDFLPAFNETYYKDEVTNPVVLRAIKEYRKVLNALLKKYGKVHKINIELAREVGKNHSQRAKIEKEQNENYKAKKDAELECEKLGLKINSKNILKLRLFKEQKEFCVYSGEKIKISDLQDEKMLEIDHIYPYSRSFDDSYMNKVLVFTKQNQEKLNKTPFETFGNDRVKWQKIEVLAKNLPTKKQKRILDKNYKDKEQKDFKDRNLNDTRYIARLVLNYTKDYLDFLPLSDDENTKLNDTQKGSKVHVEAKSGMLTSTLRHTWGFSTKDRNNHLHHAIDAAIIAYANNSIVKAFSDFKKEQESNTAELYAKKISELDYKNKRKFFEPFSGFRQKLLDKIDEIFVSKPERKKPSGALHEETFRKEEEFYQSYGGKEGVLKALELGKIRKVNGKMVKNGDMFRVDIFKHKKTNKFYAVPIYTMDFALKVLPNKAVVQGKDKKSGLIKDWILMDENYEFCFSLYKDSLILIQTKDMQEPELVYYERLDSSNASLTVSKHDNKFETLSKNQKILFKNANEKEVIAKSIGIQNLKVFEKYIVSALGEVTKAEFRQREDFKK

SEQ ID NO: 118 - protein, 984 aa, Campylobacter jejuni
  Campylobacter jejuni subsp. jejuni 140-16
MARILAFDIGISSIGWAFSENDELKDCGVRIFTKVENPKTGESLALPRRLARSARKRLARRKARLNHLKHLIANEFKLNYEDYQSFDESLAKAYKGSLISPYELRFRALNELLSKQDFARVILHIAKRRGYDDIKNSDDKEKGAILKAIKQNEEKLANYQSVGEYLYKEYFQKFKENSKEFTNVRNKKESYERCIAQSFLKDELKLIFKKQREFGFSFSKKFEEEVLSVAFYKRALKDFSHLVGNCSFFTDEKRAPKNSPLAFMFVALTRIINLLNNLKNTEGILYTKDDLNALLNEVLKNGTLTYKQTKKLLGLSDDYEFKGEKGTYFIEFKKYKEFIKALGEHNLSQDDLNEIAKDITLIKDEIKLKKALAKYDLNQNQIDSLSKLEFKDHLNISFKALKLITPLMLEGKKYDEACNELNLKVAINEDKKDFLPAFNETYYKDEVTNPVVLRAIKEYRKVLNALLKKYGKVHKINIELAREVGKNHSQRAKIEKEQNENYKAKKDAELECEKLGLKINSKNILKLRLFKEQKEFCAYSGEKIKISDLQDEKMLEIDHIYPYSRSFDDSYMNKVLVFTKQNQEKLNKTPFEAFGNDSAKWQKIEVLAKNLPTKKQKRILDKNYKDKEQKDFKDRNLNDTRYIARLVLNYTKDYLDFLPLSDDENTKLNDTQKGSKVHVEAKSGMLTSALRHTWGFSTKDRNNHLHHAIDAVIIAYANNSIVKAFSDFKKEQESNSAELYAKKISELDYKNKRKFFEPFSGFRQKVLDKIDEIFVSKPERKKPSGALHEETFRKEEEFYQSYGGKEGVLKALELGKIRKVNGKIVKNGDMFRVDIFKHKKTNKFYAVPIYTMDFALKVLPNKAVARSKKGEIKDWILMDENYEFCFSLYKDSLILIQTKDMQEPEFVYYNAFTSSTVSLIVSKHDNKFETLSKNQKILFKNANEKEVIAKSIGIQNLKVFEKYIVSALGEVTKAEFIQREDFKK

SEQ ID NO: 119 - protein, 984 aa, Campylobacter jejuni
  Campylobacter jejuni subsp. jejuni 1577
MARILAFDIGISSIGWAFSENDELKDCGVRIFTKVENPKTGESLALPRRLARSARKRLARRKVRLNHLKHLIANEFKLNYEDYQSFDESLAKAYKGSLISPYELRFRALNELLSKQDFARVILHIAKRRGYDDIKNSDDKEKGAILKAIKQNEEKLANYQSVGEYLYKEYFQKFKENSKEFTNVRNKKESYERCIAQSFLKDELKLIFKKQREFGFSFSKKFEEEVLSVAFYKRALKDFSHLVGNCSFFTDEKRAPKNSPLAFMFVALTRIINLLNNLKNTEGILYTKDDLNALLNEVLKNGTLTYKQTKKLLGLSDDYEFKGEKGTYFIEFKKYKEFIKALGEHNLSQDDLNEIAKDITLIKDEIKLKKALAKYDLNQNQIDSLSKLEFKDHLNISFKALKLITPLMLEGKKYDEACNELNLKVAINEDKKDFLPAFNETYYKDEVTNPVVLRAIKEYRKVLNALLKKYGKVHKINIELAREVGKNHSQRAKIEKEQNENYKAKKDAELECEKLGLKINSKNILKLRLFKEQKEFCAYSGEKIKISDLQDEKMLEIDHIYPYSRSFDDSYMNKVLVFTKQNQEKLNKTPFEAFGNDSAKWQKIEVLAKNLPTKKQKRILDKNYKDKEQKDFKDRNLNDTRYIARLVLNYTKDYLDFLPLSDDENTKLNDTQKGSKVHVEAKSGMLTSALRHTWGFSTKDRNNHLHHAIDAVIIAYANNSIVKAFSDFKKEQESNSAELYAKKISELDYKNKRKFFEPFSGFRQKVLDKIDEIFVSKPERKKPSGALHEETFRKEEEFYQSYGGKEGVLKALELGKIRKVNGKIVKNGDMFRVDIFKHKKTNKFYAVPIYTMDFALKVLPNKAVARSKKGEIKDWILMDENYEFCFSLYKDSLILIQTKDMQEPEFVYYNAFTSSTVSLIVSKHDNKFETLSKNQKILFKNANEKEVIAKSIGIQNLKVFEKYIVSALGEVTKAEFRQREDFKK

SEQ ID NO: 120 - protein, 987 aa, Campylobacter jejuni
  Campylobacter jejuni subsp. jejuni 1854
MARILAFDIGISSIGWAFSENDELKDCGVRIFTKAENPKTGESLALPRRLARSARKRLARRKARLNHLKHLIANEFKLNYEDYQSFDESLAKAYKGSLISPYELRFRALNELLSKQDFARVILHIAKRRGYDDIKNSDDKEKGAILKAIKQNEEKLANYQSVGEYLYKEYFQKFKENSKEFTNVRNKKESYERCIAQSFLKDELKLIFKKQREFGFSFSKKFEEEVLSVAFYKRALKDFSHLVGNCSFFTDEKRAPKNSPLAFMFVALTRIINLLNNLKNTEGILYTKDDLNTLLNEVLKNGTLTYKQTKKLLGLSDDYEFKGEKGTYFIEFKKYKEFIKSLGDHSLSQDDLNEIAKDITLIKDEIKLKKALAKYDLNQNQIDSLSKLEFKDHLNISFKALKLITPLMLEGKKYDEACNELNLKVAINEDKKDFLPAFNETYYKDEVTNPVVLRAIKEYRKVLNALLKKYGKVHKINIELAREVGKNHSQRAKIEKEQNENYKAKKDAELECEKLGLKINSKNILKLRLFKEQKEFCAYSGEKIKISDLQDEKMLEIDHIYPYSRSFDDSYMNKVLVFTKQNQEKLNQTPFEAFGNDSAKWQKIEVLAKNLPTKKQKRILDKNYKDKEQKNFKDRNLNDTRYIARLVLNYTKDYLDFLPLSDDENTKLNDTQKGSKVHVEAKSGMLTSALRHTWGFSAKDRNNHLHHAIDAVIIAYANNSIVKAFSDFKKEQESNSAELYAKKISELDYKNKRKFFEPFSGFRQKVLDKIDEIFVSKPERKKPSGALHEETFRKEEEFYQSYGGKEGVLKALELGKIRKVNGKIVKNGDMFRVDIFKHKKTNKFYAVPIYTMDFALKVLPNKAVARSKKGEIKDWILMDENYEFCFSLYKDSLILIQTKDMQEPEFVYYNAFTSSTVSLIVSKHDNKFETLSKNQKILFKNANEKEVIAKSIGIQNLKVFEKYIVSALGEVTKAEFRQREDFKNELR

SEQ ID NO: 121 - protein, 984 aa, Campylobacter jejuni
  Campylobacter jejuni subsp. jejuni 1997-10
MARILAFDIGISSIGWAFSENDELKDCGVRIFTKAENPKTGESLALPRRLARSARKRLARRKARLNRLKHLIANEFKLNYEDYQSFDESLAKAYKGSLISPYELRFRALNELLSKQDFARVILHIAKRRGYDDIKNSDDKEKGAILKAIKQNEEKLANYQSVGEYLYKEYFQKFKENSKEFTNVRNKKESYERCIAQSFLKDELKLIFKKQREFGFSFSKKFEEEVLSVAFYKRALKDFSHLVGNCSFFTDEKRAPKNSPLAFMFVALTRIINLLNNLKNTEGILYTKDDLNALLNEVLKNGTLTYKQTKKLLGLSDDYEFKGEKGTYFIEFKKYKEFIKALGDHSLNQDDLNEIAKDITLIKDEIKLKKALAKYDLNQNQIDSLSKLEFKDHLNISFKALKLITPLMLEGKKYDEACNELNLKVAINEDKKDFLPAFNETYYKDEVTNPVVLRAIKEYRKVLNALLKKYGKVHKINIELAREVGKNYSQRAKIEKEQNENYKAKKDAELECEKLGLKINSKNILKLRLFKEQKEFCVYSGEKIKISDLQDEKMLEIDHIYPYSRSFDDSYMNKVLVFTKQNQEKLNQTPFEAFGNDSAKWQKIEVLAKNLPTKKQKRILDKNYKDKEQKDFKDRNLNDTRYIARLVLNYTKDYLDFLPLSDDENTKLNDTQKGSKVYVEAKSGMLTSALRHTWGFSTKDRNNHLHHAIDAVIIAYANNSIVKAFSDFKKEQESNSAELYAKKISELDYKNKRKFFEPFSGFRQKVLDKIDEIFVSKPERKKPSGALHEETFRKEEEFYQSYGGKEGVLKALELGKIRKVNGKIVKNGDMFRVDIFKHKKTNKFYAVPIYTMDFALKVLPNKAVARSKKGEIKDWILMDENYEFCFSLYKDSLILIQTKDMQEPEFVYYNAFTSSTVSLIVSKHDNKFETLSKNQKILFKNANEKEVIAKSIGIQNLKVFEKYIVSALGEVTKAEFRQREDFKK

SEQ ID NO: 122 - protein, 987 aa, Campylobacter jejuni
  Campylobacter jejuni subsp. jejuni 2008-1025
MARILAFDIGISSIGWAFSENDELKDCGVRIFTKAENPKTGESLALPRRLARSARKRLARRKARLNHLKHLIANEFKLNYEDYQSFDESLAKAYKGSLISPYELRFRALNELLSKQDFARVILHIAKRRGYDDIKNNGDEEKSEILKAIKQNEEKLVNYQSVGEYLYKEYFQKFKENSKEFINVRNKKESYERCIAQSFLKDELKLIFQKQREFGFSFSKKFEEEVLSVAFYKRALKDFSHLVGNCSFFTDEKRAPKNSPLAFMFVALTRIINLLNNLKNTEGILYTKDDLNTLLNEVLKNGTLTYKQTKKLLGLSDDYEFKGEKGTYFIEFKKYKEFIKALGEHNLSQDNLNEIAKDITLIKDEIKLKKALAKYDLNQNQIDSLSKLEFKDHLNISFKALKLITPLMLEGKKYDEAYNELNLKVAINEDKKDFLPAFNETYYKDEVTNPVVLRAIKEYRKVLNALLKKYGKVHKINIELAREVGKNHSQRAKIEKEQNENYKAKKDAELECEKLGLKINSKNILKLRLFKEQKEFCAYSGEKIKISDLQDEKMLEIDHIYPYSRSFDDSYMNKVLVFTKQNQEKLNQTPFEAFGNDSAKWQKIEVLAKNLPTKKQKRILDKNYKDKEQKDFKDRNLNDTRYIARLVLNYTKDYLDFLPLSDDENTKLNDTQKGSKVHVEAKSGMLTSALRHTWGFSAKDRNNHLHHAIDAVIIAYANNSIVKAFSDFKKEQESNSAELYAKKISELDYKNKRKFFEPFSGFRQKVLDKIDEIFVSKPERKKPSGALHEETFRKEEEFYQSYGGKEGVLKALELGKIRKVNGKIVKNGDMFRVDIFKHKKTNKFYAVPIYTMDFALKVLPNKAVVQGKDKKSGLIKDWILMDENYEFCFSLYKDSLILIQTKDMQEPELVYFNAFTSSTVSLIVSKHDNKFETLSKNQKILFKNANEKEVIAKSIGIQNLKVFEKYIVSALGEVTKAEFRQREDFKK

SEQ ID NO: 123 - protein, 984 aa, Campylobacter jejuni
  Campylobacter jejuni subsp. jejuni 2008-872
MARILAFDIGISSIGWAFSENDELKDCGVRIFTKVENPKTGESLALPRRLARSARKRLARRKARLNHLKHLIANEFKLNYEDYQSFDESLAKAYKGSLISPYELRFRALNELLSKQDFARVILHIAKRRGYDDIKNSDDKEKGAILKAIKQNEEKLANYQSVGEYLYKEYFQKFKENSKEFTNVRNKKESYERCIAQSFLKDELKLIFKKQREFGFSFSKKFEEEVLSVAFYKRALKDFSHLVGNCSFFTDEKRAPKNSPLAFMFVALTRIINLLNNLKNTEGILYTKDDLNALLNEVLKNGTLTYKQTKKLLGLSDDYEFKGEKGTYFIEFKKYKEFIKALGEHNLSQDDLNEIAKDITLIKDEIKLKKALAKYDLNQNQIDSLSKLEFKDHLNISFKALKLITPLMLEGKKYDEACNELNLKVAINEDKKDFLPAFNETYYKDEVTNPVVLRAIKEYRKVLNALLKKYGKVHKINIELAREVGKNHSQRAKIEKEQNENYKAKKDAELECEKLGLKINSKNILKLRLFKEQKEFCAYSGEKIKISDLQDEKMLEIDHIYPYSRSFDDSYMNKVLVFTKQNQEKLNKTPFEAFGNDSAKWQKIEVLAKNLPTKKQKRILDKNYKDKEQKDFKDRNLNDTRYIARLVLNYTKDYLDFLPLSDDENTKLNDTQKGSKVHVEAKSGMLTSALRHTWGFSTKDRNNHLHHAIDAVIIAYANNSIVKAFSDFKKEQESNSAELYAKKISELDYKNKRKFFEPFSGFRQKVLDKIDEIFVSKPERKKPSGALHEETFRKEEEFYQSYGGKEGVLKALELGKIRKVNGKIVKNGDMFRVDIFKHKKTNKFYAVPIYTMDFALKVLPNKAVARSKKGEIKDWILMDENYEFCFSLYKDSLILIQTKDMQEPEFVYYNAFTSSTVSLIVSKHDNKFETLSKNQKILFKNANEKEVIAKSIGIQNLKVFEKYIVSALGEVTKAEFRQREDFKK

SEQ ID NO: 124 - protein, 987 aa, Campylobacter jejuni
  Campylobacter jejuni subsp. jejuni 2008-979
MARILAFDIGISSIGWAFSENDELKDCGVRIFTKAENPKTGESLALPRRLARSARKRLARRKARLNHLKHLIANEFKLNYEDYQSFDESLAKAYKGSLISPYELRFRALNELLSKQDFARVILHIAKRRGYDDIKNSDDKEKGAILKAIKQNEEKLVNYQSVGEYLYKEYFQKFKENSKEFTNVRNKKESYERCIAQSFLKDELKLIFKKQREFGFSFSKKFEEEVLSVAFYKRALKDFSHLVGNCSFFTDEKRAPKNSPLAFMFVALTRIINLLNNLKNTEGILYTKDDLNALLNEVLKNGTLTYKQTKKLLGLSDDYEFKGEKGTYFIEFKKYKEFIKALGDHSLSQDDLNEIAKDITLIKDEIKLKKALAKYDLNQNQIDSLSKLEFKDHLNISFKALKLITPLMLEGKKYDEACNELNLKVAINEDKKDFLPAFNETYYKDEVTNPVVLRAIKEYRKVLNALLKKYGKVHKINIELAREVGKNYSQRAKIEKEQNENYKAKKDAELECEKLGLKINSKNILKLRLFKEQKEFCAYSGEKIKISDLQDEKMLEIDHIYPYSRSFDDSYMNKVLVFTKQNQEKLNQTPFEAFGNDSAKWQKIEVLAKNLPTKKQKRILDKNYKDKEQKDFKDRNLNDTRYIARLVLNYTKDYLDFLPLSDDENTKLNDTQKGSKVHVEAKSGMLTSALRHTWGFSAKDRNNHLHHAIDAVIIAYANNSIVKAFSDFKKEQESNSAELYAKKISELDYKNKRKFFEPFSGFRQKVLDKIDEIFVSKPERKKPSGALHEETFRKEEEFYQSYGGKEGVLKALELGKIRKVNGKIVKNGDMFRVDIFKHKKTNKFYAVPIYTMDFALKVLPNKAVARSEKGEIKDWILMDENYEFCFSLYKDSLILIQTKDMQEPELVYFNAFTSSTVSLIVSKHDNKFETLSKNQKILFKNANEKEVIAKSIGIQNLKVFEKYIVSALGEVTKAEFRQREDFKNELR

SEQ ID NO: 125 - protein, 965 aa, Campylobacter jejuni
  Campylobacter jejuni subsp. jejuni 2008-988
MKIIGFNLGIANIGWALRENDEIIDCGVRVFDIPENPKNGNSLALERRENKARMKIVKRKKARMLATKTFLKKELNVDLSKLFLIGSTQSIYELRAKALSSLISKEELSAIILHIAKHRGYDDSALKNENGTIIEALNKNKETMLKFKSVGEYFYKNFVQNKEVKKIRNTTEDYSNSVPRSLLKQELDLILDKQKELGLIKNADFKEKLFEIIFFKRPLKDFSNKIGNCIFFENEKRAAKNTISACEFVALGKVVNLLKSIEKDIGIVYEKDSINEIMSIILDKTSISYKKIRDILNLPQEINFKGLDYSKNNVENSKLVDLKKLNEFKKALGDGFANLDKDILDSIATDITLTKDTATLKEKLKNYNVLNAEQIEKLSELVFNDHINLSLKALKQIIPLMYEGKRYDEACELCNFTIAKNQEKSEYLPLFEKTRFAKDISSPVVIRAICEFRKLLNDIIRRYGSVHKIHLELTRDFGISFSDRKKIIKEIEQNEQSRIKALETIKELKLEETSKNIQIVRLFEDQKGICPYSGLKMDLNRLDELVIDYIRPYNRSLDDSYSNKVLTFKKLSDLKQGKTPFEAFGEDEKLWAEINERIKEYNGKKRFKIFDKFFKDKKPFDFTEQTLQDTRWLTKLVASYLNEYLSFLPISEDENTALGYGEKGSKQHVILSSGMITQMLRNFWYLGFKNHKDYKNNAMDAIIVAFTTNSIIFAFNNFKKELDLAKAEFYANKISESDYLLKRKFLPPFSGFKEQALEKVKNIFVSHSLKIKNKGTLHDLTPLKIKELKNTYGDLDLAVKLGKIRKYNDKYYANANGSLVRADLFVDKKNKFHAVSIYKADFSTKKLPNKTPATTSNGETKEGIEMNENYNFCMSLYKNTPISVKIKGMKEPIICYYHGFNTSGSKITYKKHDNNYHNLSEDEMVVFRKNDKESIAVGKILEIKKYSISPSGELSLIENEERKWF

SEQ ID NO: 126 - protein, 984 aa, Campylobacter jejuni
  Campylobacter jejuni subsp. jejuni 2008-988
MARILAFDIGISSIGWAFSENDELKDCGVRIFTKVENPKTGESLALPRRLARSARKRLARRKARLNHLKHLIANEFKLNYEDYQSFDESLAKAYKGSLISPYELRFRALNELLSKQDFARVILHIAKRRGYDDIKNSDDKEKGAILKAIKQNEEKLANYQSVGEYLYKEYFQKFKENSKEFTNVRNKKESYERCIAQSFLKDELKLIFKKQREFGFSFSKKFEEEVLSVAFYKRALKDFSHLVGNCSFFTDEKRAPKNSPLAFMFVTLTRIINLLNNLKNTEGILYTKDDLNALLNEVLKNGTLTYKQTKKLLGLSDDYEFKGEKGTYFIEFKKYKEFIKALGEHNLSQDDLNEIAKDITLIKDEIKLKKALAKYDLNQNQIDSLSKLEFKDHLNISFKALKLITPLMLEGKKYDEACNELNLKVAINEDKKDFLPAFNETYYKDEVTNPVVLRAIKEYRKVLNALLKKYGKVHKINIELAREVGKNHSQRAKIEKEQNENYKAKKDAELECEKLGLKINSKNILKLRLFKEQKEFCAYSGEKIKISDLQDEKMLEIDHIYPYSRSFDDSYMNKVLVFTKQNQEKLNKTPFEAFGNDSAKWQKIEVLAKNLPTKKQKRILDKNYKDKEQKDFKDRNLNDTRYIARLVLNYTKDYLDFLPLSDDENTKLNDTQKGSKVHVEAKSGMLTSALRHTWGFSTKDRNNHLHHAIDAVIIAYANNSIVKAFSDFKKEQESNSAELYAKKISELDYKNKRKFFEPFSGFRQKVLDKIDEIFVSKPERKKPSGALHEETFRKEEEFYQSYGGKEGVLKALELGKIRKVNGKIVKNGDMFRVDIFKHKKTNKFYAVPIYTMDFALKVLPNKAVARSKKGEIKDWILMDENYEFCFSLYKDSLILIQTKDMQEPEFVYYNAFTSSTVSLIVSKHDNKFETLSKNQKILFKNANEKEVIAKSIGIQNLKVFEKYIVSALGEVTKAEFRQREDFKK

SEQ ID NO: 127 - protein, 961 aa, Campylobacter jejuni
  Campylobacter jejuni subsp. jejuni 260.94
MARILAFDIGISSIGWAFSENDELKDCGVRIFTKAENPKTGESLALPRRLARSARKRLARRKARLNHLKHLIANEFKLNYEDYQSFDESLAKAYKGSLISPYELRFRALNELLSKQDFARVILHIAKRRGYDDIKNNGDEEKGKILKAIKQNEEKLVNYQSVGEYLYKEYFQKFKENSKEFINVRNKKESYERCITQSFLKYELKLIFQKQREFGFSFSKKFEEEVLSVAFYKRALKDFSHLVGNCSFFSDEKRAPKNSPLAFMFVALTRIINLLNNLKNTEGILYTKDDLNALLNEVLKNGTLTYKQTKKLLGLSDDYEFKGEKGTYFIEFKKYKEFIKALGEHNLSQDDLNEIAKDITLIKDEIKLKKALAKYDLNQNQIDSLSKLEFKDHLNIGFKALKLITPLMLEGKKYDEACNELNLKVAINEDKKDFLPAFNETYYKDEVTNPVVLRAIKEYRKVLNALLKKYGKVHKINIELAREVGKNHSQRAKIEKEQNENYKAKKDAELECEKLGLKINSKNILKLRLFKEQKEFCAYSGEKIKLSDLQDEKMLEIDHIYPYSRSFDDSYMNKVLVFTKQNQEKLNKTPFEAFGNDNVKWQKIEVLAKNLPEKKQKRILDKNYKDKEQKDFKDRNLNDTRYIARLVLNYTKDYLDFLPLSDDENTKLKGSKVHVEAKSGMLTSALRHTWGFSTKDRNNHLHHAIDAAIIAYANNSIVKDFSDFKKEQESNSAELYAKKISELDYKNKRKFFEPFSGFRQKVLDKIDEIFVSKPERKKPSGALHEETFRKEEEFYQSYGGKEGVLKALELGKIRKVNGKIVKNGDMFRVDIFKHKKTNKFYAVPIYTMDFALKVLPNKAVARSKKGEIKDWILMDENYEFCFSLYKDSLILIQTKDMQEPELVYFNAFTSSTVSLIVSKHDNKFETLSKNLKVFEKYIVSALGEVTKAEFRQREDFKNELR

SEQ ID NO: 128 - protein, 985 aa, Campylobacter jejuni
  Campylobacter jejuni subsp. jejuni 414
MAKILAFDIGISSIGWAFVENDELKDCGVRIFTKAENPKTGESLALPRRLARSARKRLARRKARLNHLKHLIANEFKLNYEDYQSFDESLAKAYKGTLISPYELRFKALNELLSKQDLARVILHIAKRRGYDNIKNSDDKEKGAILKAVKENEEKLANYKSVGEYLYKEYFQKFKENSKEFINVRNKKESYERCIAQSFLKDELKLIFQKQREFGFNFSKKFEEEVLSVAFYKRALKDFSHLVGNCSFFVDEKRAPKNSPLAFEFVALTRIVNLLNNLNKNNSYIKDDLNALLSEVLKNGTLTYKQTKKILGLSDDYEFKGQKGNYFIEFKKYKEFIKALCEHNLNQDDLNEIAKDITLVKDETKLKKALAKYDLNQNQIENLSKIEFKDHLNISFKALKLIVPLMREGKKYDEVCNELNLKTAINEDKKEFLPAFNETYYKDEVNNPVVLRAIKEYRKVLNSLLKKYGKVHKINIELAREVGKNHRERSKIEKEQNENFKAKKDAELECEKLGLKINSKNILKLRLFKEQKEFCVYSGEKIKISDLQDEKMLEIDHIYPYSRSFDDSYMNKVLVFTKQNQEKLNKTPFEAFGKDDVKWQKIETLAKNLPAKKQKRILDKNYKDKEQKDFKDRNLNDTRYIARLVLNYTKDYLEFLPLSDDENIKLNDTQKGSKVHVEAKSGMLTSVLRHTWGFSTKDRNNHLHHAIDAVIIAYANASVVKAFSDFKKEQENYTAELYAKKINELDFKNKRKFFEPFSNFRQKVLEKIDEIFVSKPERKKPSGALHEETFYKEEEFYKEYGGKEGVLKALELGKIRKVNGKIVSNANMFRVDIFKYKKTNKFYAVPIYTMDFALGILPNKAVVGGKDKQGIIKDWLLMDENYEFCFSLYKDSLILLQTKDMQEPELVYFKSFKSSTAGLVVSKHDNKFENLNENQKKLFKSANEKKVVAEGIGIQNLKVFEKYIVSALGEITKAEIKERENFKKK

SEQ ID NO: 129 - protein, 984 aa, Campylobacter jejuni
  Campylobacter jejuni subsp. jejuni 51037
MARILAFDIGISSIGWAFSENDELKDCGVRIFTKAENPKTGESLALPRRLARSARKRLARRKARLNHLKHLIANEFKLNYEDYQSFDESLAKAYKGSLISPYELRFRALNELLSKQDFARVILHIVKRRGYDDIKNSDDKEKGTILKAIKQNEEKLANYQSVGEYLYKEYFQKFKENSKEFTNVRNKKESYERCIAQSFLKDELKLIFKKQREFGFSFSKKFEEEVLSVAFYKRALKDFSHLVGNCSFFTDEKRAPKNSPLAFMFVALTRIINLLNNLKNTEGILYTKDDLNTLLNEVLKNGTLTYKQTKKLLGLSDDYEFKGEKGTYFIEFKKYKEFIKALGEHNLSQDDLNEIAKDITLIKDEIKLKKALAKYDLNQNQIDSLSKLEFKDHLNISFKALKLITPLMLEGKKYDEACNELNLKVAINEDKKDFLPAFNETYYKDEVTNPVVLRAIKEYRKVLNALLKKYGKVHKINIELAREVGKNYSQRAKIEKEQNENYKAKKDAELECEKLGLKINSKNILKLRLFKEQKEFCAYSGEKIKISDLQDEKMLEIDHIYPYSRSFDDSYMNKVLVFTKQNQEKLNQTPFEAFGNDSAKWQKIEVLAKNLPTKKQKRILDKNYKDKEQKDFKDRNLNDTRYIARLVLNYTKDYLDFLPLSDDENTKLNDTQKGSKVHVEAKSGMLTSALRHTWGFSAKDRNNHLHHAIDAVIIAYANNSIVKAFSDFKKEQESNSAELYAKKISELDYKNKRKFFEPFSGFRQKVLDKIDEIFVSKPERKKPSGALHEETFRKEEEFYQSYGGKEGVLKALELGKIRKVNGKIVKNGDMFRVDIFKHKKTNKFYAVPIYTMDFALKVLPNKAVARSKKGEIKDWILMDENYEFCFSLYKDSLILIQTKDMQEPEFVYYNAFTSSTVSLIVSKHDNKFETLSKNQKILFKNANEKEVIAKSIGIQNLKVFEKYIVSALGEVTKAEFRQREDFKK

SEQ ID NO: 130 - protein, 984 aa, Campylobacter jejuni
  Campylobacter jejuni subsp. jejuni 51494
MARILAFDIGISSIGWAFSENDELKDCGVRIFTKAENPKTGESLALPRRLARSARKRLARRKARLNHLKHLIANEFKLNYEDYQSFDESLAKAYKGSLISPYELRFRALNELLSKQDFARVILHIAKRRGYDDIKNSDDKEKGAILKAIKQNEEKLANYQSVGEYLYKEYFQKFKENSKEFTNVRNKKESYERCIAQSFLKDELKLIFKKQREFGFSFSKKFEEEVLSVAFYKRALKDFSHLVGNCSFFTDEKRAPKNSPLAFMFVALTRIINLLNNLKNTEGILYTKDDLNTLLNEVLKNGTLTYKQTKKLLGLSDDYEFKGEKGTYFIEFKKYKEFIKALGEHNLSQDDLNEIAKDITLIKDEIKLKKALAKYDLNQNQIDSLSKLEFKDHLNISFKALKLITPLMLEGKKYDEACNELNLKVAINEDKKDFLPAFNETYYKDEVTNPVVLRAIKEYRKVLNALLKKYGKVHKINIELAREVGKNYSQRAKIEKEQNENYKAKKDAELECEKLGLKINSKNILKLRLFKEQKEFCAYSGEKIKISDLQDEKMLEIDHIYPYSRSFDDSYMNKVLVFTKQNQEKLNKTPFEAFGNDSTKWQKIEVLAKNLPEKKQKRILDKNYKDKEQKDFKDRNLNDTRYIARLVLNYTKDYLDFLPLSDDENTKLNDTQKGLKVHVEAKSGMLTSALRHTWGFSAKDRNNHLHHAIDAVIIAYANNSIVKAFSDFKKEQESNSAELYAKKISELDYKNKRKFFEPFSGFRQKVLDKIDEIFVSKPERKKPSGALHEETFRKEEEFYQSYGGKEGVLKALELGKIRKVNGKIVKNGDMFRVDIFKHKKTNKFYAVPIYTMDFALKVLPNKAVARSKKGEIKDWILMDENYEFCFSLYKDSLILIQTKDMQEPEFVYYNAFTSSTVSLIVSKHDNKFETLSKNQKILFKNANEKEVIAKSIGIQNLKVFEKYIVSALGEVTKAEFRQREDFKK

SEQ ID NO: 131 - protein, 987 aa, Campylobacter jejuni
  Campylobacter jejuni subsp. jejuni 53161
MARILAFDIGISSIGWAFSENDELKDCGVRIFTKAENPKTGESLALPRRLARSARKRLARRKARLNHLKHLIANEFKLNYEDYQSFDEGLAKAYKGSLISPYELRFRALNELLSKQDFARVILHIAKRRGYDDIKNNGDEEKSEILKAIKQNEEKLVNYQSVGEYLYKEYFQKFKENSKEFINVRNKKESYERCIAQSFLKDELKLIFQKQREFGFSFSKKFEEEVLSVAFYKRALKDFSHLVGNCSFFTDEKRAPKNSPLAFMFVALTRIINLLNNLKNTEGILYTKDDLNTLLNEVLKNGTLTYKQTKKLLGLSDDYEFKGEKGTYFIEFKKYKEFIKALGEHNLSQDNLNEIAKDITLIKDEIKLKKALAKYDLNQNQIDSLSKLEFKDHLNISFKALKLITPLMLEGKKYDEAYNELNLKVAINEDKKDFLPAFNETYYKDEVTNPVVLRAIKEYRKVLNALLKKYGKVHKINIELAREVGKNHSQRAKIEKEQNENYKAKKDAELECEKLGLKINSKNILKLRLFKEQKEFCAYSGEKIKISDLQDEKMLEIDHIYPYSRSFDDSYMNKVLVFTKQNQEKLNQTPFEAFGNDSAKWQKIEVLAKNLPTKKQKRILDKNYKDKEQKDFKDRNLNDTRYIARLVLNYTKDYLDFLPLSDDENTKLNDTQKGSKVHVEAKSGMLTSALRHTWGFSAKDRNNHLHHAIDAVIIAYANNSIVKAFSDFKKEQESNSAELYAKKISELDYKNKRKFFEPFSGFRQKVLDKIDEIFVSKPERKKPSGALHEETFRKEEEFYQSYGGKEGVLKALELGKIRKVNGKIVKNGDMFRVDIFKHKKTNKFYAVPIYTMDFALKVLPNKAVVQGKDKKSGLIKDWILMDENYEFCFSLYKDSLILIQTKDMQEPELVYFNAFTSSTVSLIVSKHDNKFETLSKNQKILFKNANEKEVIAKSIGIQNLKVFEKYIVSALGEVTKAEFRQREDFKK

SEQ ID NO: 132 - protein, 984 aa, Campylobacter jejuni
  Campylobacter jejuni subsp. jejuni 60004
MARILAFDIGISSIGWAFSENDELKDCGVRIFTKAENPKTGESLALPRRLARSARKRLARRKARLNHLKHLIANEFKLNYEDYQSFDESLAKAYKGSLISPYELRFRALNELLSKQDFARVILHIAKRRGYDDIKNNGDEEKGKILKAIKQNEEKLVNYQSVGEYLYKEYFQKFKENSKEFINVRNKKESYERCITQSFLKYELKLIFQKQREFGFSFSKKFEEEVLSVAFYKRALKDFSHLVGNCSFFTDEKRAPKNSPLAFMFVALTRIINILNNLKNTEGILYTKDDLNALLNEVLKNGTLTYKQTKKLLGLSDDYEFKGEKGTYFIEFKKYKEFIKALGEHNLSQDDLNEIAKDITLIKDEIKLKKALAKYDLNQNQIDSLSKLEFKDHLNISFKALKLITPLMLEGKKYDEACNELNLKVAINEDKKDFLPAFNETYYKDEVTNPVVLRAIKEYRKILNALLKKYGKVHKINIELAREVGKNHSQRAKIEKEQNENYKAKKDAEIECEKLGLKINSKNILKLRLFKEQKEFCAYSGEKIKISDLQDEKMLEIDHIYPYSRSFDDSYMNKVLVFTKQNQEKLNQTPFEAFGNDSAKWQKIEVLAKNLPTKKQKRILDKNYKDKEQKDFKDRNLNDTRYIARLVLNYTKDYLDFLPLSDDENTKLNDTQKGSKVHVEAKSGMLTSALRHTWGFSAKDRNNHLHHAIDAVIIAYANNSIVKAFSDFKKEQESNSAELYAKKISELDYKNKRKFFEPFSGFRQKVLDKIDEIFVSKPERKKPSGALHEETFRKEEEFYQSYGGKEGVLKALELGKIRKVNGKIVKNGDMFRVDIFKHKKTNKFYAVPIYTMDFALKVLPNKAVARSKKGEIKDWILMDENYEFCFSLYKDSLILIQTKDMQEPEFVYYNAFTSSTVSLIVSKHDNKFETLSKNQKILFKNANEKEVIAKSIGIQNLKVFEKYIVSALGEVTKAEFRQREDFKK

SEQ ID NO: 133 - protein, 984 aa, Campylobacter jejuni
MARILAFDIGISSIGWAFSENDELKDCGVRIFTKAENPKTGESLALPRRLARSARKRLARRKARLNHLKHLIANEFKLNYEDYQSFDESLAKAYKGSLISPYELRFRALNELLSKQDFARVILHIAKRRGYDDIKNNGDEEKSEILKAIKQNEEKLVNYQSVGEYLYKEYFQKFKENSKEFINVRNKKESYERCITQSFLKDELKLIFQKQREFGFSFSKKFEEEVLSVAFYKRALKDFSHLVGNCSFFTDEKRAPKNSPLAFMFVALTRIINILNNLKNTEGILYTKDDLNALLNEVLKNGTLTYKQTKKLLGLSDDYEFKGEKGTYFIEFKKYKEFIKALGEHNLSQDDLNEIAKDITLIKDEIKLKKALAKYDLNQNQIDSLSKLEFKDHLNISFKALKLITPLMLEGKKYDEACNELNLKVAINEDKKDFLPAFNETYYKDEVTNPVVLRAIKEYRKILNALLKKYGKVHKINIELAREVGKNHSQRAKIEKEQNENYKAKKDAEIECEKLGLKINSKNILKLRLFKEQKEFCAYSGEKIKLSDLQDEKMLEIDHIYPYSRSFDDSYMNKVLVFTKQNQEKLNKTPFEAFGNDSTKWQKIEVLAKNLPEKKQKRILDKNYKDKEQKDFKDRNLNDTRYIARLVLNYTKDYLDFLPLSDDENTKLNDTQKGSKVHVEAKSGMLTSALRHTWGFSAKDRNNHLHHAIDAAIIAYANNSIVKAFSDFKKEQESNSVELYAKKISELDYKNKRKFFEPFSGFRQKVLDKIDEIFVSKPERKKPSGALHEETFRKEEEFYQSYGGKEGVLKALELGKIRKVNGKIVKNGDMFRVDIFKHKKTNKFYAVPIYTMDFALKVLPNKAVARSKKGEIKDWILMDENYEFCFSLYKDSLILIQTKDMQEPELVYFNAFTSSTVSLIVSKHDNKFETLSKNQKILFKNANEKEVIAKSIGIQNLKVFEKYIVSALGEVTKAEFRQREDFKK

SEQ ID NO: 134 - protein, 984 aa, Campylobacter jejuni
  Campylobacter jejuni subsp. jejuni 84-25
MVRILAFDIGISSIGWAFSENDELKDCGVRIFTKVENPKTGESLALPRRLARSARKRLARRKARLNHLKHLIANEFKLNYEDYQSFDESLAKAYKGSLISPYELRFRALNELLSKQDFARVILHIAKRRGYDDIKNSDDKEKGAILKAIKQNEEKLANYQSVGEYLYKEYFQKFKENSKEFTNVRNKKESYERCIAQSFLKDELKLIFKKQREFGFSFSKKFEEEVLSVAFYKRALKDFSHLVGNCSFFTDEKRAPKNSPLAFMFVALTRIINLLNNLKNTEGILYTKDDLNALLNEVLKNGTLTYKQTKKLLGLSDDYEFKGEKGTYFIEFKKYKEFIKALGEHNLSQDDLNEIAKDITLIKDEIKLKKALAKYDLNQNQIDSLSKLEFKDHLNISFKALKLITPLMLEGKKYDEACNELNLKVAINEDKKDFLPAFNETYYKDEVTNPVVLRAIKEYRKVLNALLKKYGKVHKINIELAREVGKNHSQRAKIEKEQNENYKAKKDAELECEKLGLKINSKNILKLRLFKEQKEFCAYSGEKIKISDLQDEKMLEIDHIYPYSRSFDDSYMNKVLVFTKQNQEKLNKTPFEAFGNDSAKWQKIEVLAKNLPTKKQKRILDKNYKDKEQKDFKDRNLNDTRYIARLVLNYTKDYLDFLPLSDDENTKLNDTQKGSKVHVEAKSGMLTSALRHTWGFSTKDRNNHLHHAIDAVIIAYANNSIVKAFSDFKKEQESNSAELYAKKISELDYKNKRKFFEPFSGFRQKVLDKIDEIFVSKPERKKPSGALHEETFRKEEEFYQSYGGKEGVLKALELGKIRKVNGKIVKNGDMFRVDIFKHKKTNKFYAVPIYTMDFALKVLPNKAVARSKKGEIKDWILMDENYEFCFSLYKDSLILIQTKDMQEPEFVYYNAFTSSTVSLIVSKHDNKFETLSKNQKILFKNANEKEVIAKSIGIQNLKVFEKYIVSALGEVTKAEFRQREDFKK

SEQ ID NO: 135 - protein, 984 aa, Campylobacter jejuni
  Campylobacter jejuni subsp. jejuni 87459
MARILAFDIGISSIGWAFSENDELKDCGVRIFTKAENPKTGESLALPRRLARSARKRLARRKARLNHLKHLIANEFKLNYEDYQSFDESLAKAYKGSLISPYELRFRALNELLSKQDFARVILHIAKRRGYDDIKNSDDKEKGAILKAIKQNEEKLANYQSVGEYLYKEYFQKFKENSKEFTNVRNKKESYERCIAQSFLKDELKLIFKKQREFGFSFSKKFEEEVLSVAFYKRALKDFSHLVGNCSFFTDEKRAPKNSPLAFMFVALTRIINLLNNLKNTEGILYTKDDLNTFLNEVLKNGTLTYKQTKKLLGLSDDYEFKGEKGTYFIEFKKYKEFIKALGDHNLSQDDLNEIAKDITLIKDEIKLKKALAKYDLNQNQIDSLSKLEFKDHLNISFKALKLITPLMLEGKKYDEACNELNLKVAINEDKKDFLPAFNETYYKDEVTNPVVLRAIKEYRKVLNALLKKYGKVHKINIELAREVGKNHSQRAKIEKEQNENYKAKKDAELECEKLGLKINSKNILKLRLFKEQKEFCAYSGEKIKISDLQDEKMLEIDHIYPYSRSFDDSYMNKVLVFTKQNQEKLNKTPFEAFGNDSAKWQKIEVLAKNLPTKKQKRILDKNYKDKEQKDFKDRNLNDTRYIARLVLNYTKDYLDFLPLSDDENTKLNDTQKGSKVHVEAKSGMLTSALRHTWGFSTKDRNNHLHHAIDAVIIAYANNSIVKAFSDFKKEQESNSAELYAKKISELDYKNKRKFFEPFSGFRQKVLDKIDEIFVSKPERKKPSGALHEETFRKEEEFYQSYGGKEGVLKALELGKIRKVNGKIVKNGDMFRVDIFKHKKTNKFYAVPIYTMDFALKVLPNKAVARSKKGEIKDWILMDENYEFCFSLYKDSLILIQTKDMQEPEFVYYNAFTSSTVSLIVSKHDNKFETLSKNQKILFKNANEKEVIAKSIGIQNLKVFEKYIVSALGEVTKAEFRQREDFKK

SEQ ID NO: 136 - protein, 984 aa, Campylobacter jejuni
  Campylobacter jejuni subsp. jejuni ATCC 33560
MARILAFDIGISSIGWAFSENDELKDCGVRIFTKAENPKTGESLALPRRLARSARKRLARRKARLNHLKHLIANEFKLNYEDYQSFDESLAKAYKGSLISPYELRFRALNELLSKQDFARVILHIAKRRGYDDIKNSDDKEKGAILKAIKQNEEKLANYQSVGEYLYKEYFQKFKENSKEFTNVRNKKESYERCIAQSFLKDELKLIFKKQREFGFSFSKKFEEEVLSVAFYKRALKDFSHLVGNCSFFTDEKRAPKNSPLAFMFVALTRIINLLNNLKNTEGILYTKDDLNALLNEVLKNGTLTYKQTKKLLGLSDDYEFKGEKGTYFIEFKKYKEFIKALGDHSLSQDDLNEIAKDITLIKDEIKLKKALAKYDLNQNQIDSLSKLEFKDHLNISFKALKLITPLMLEGKKYDEACNELNLKVAINEDKKDFLPAFNETYYKDEVTNPVVLRAIKEYRKVLNALLKKYGKVHKINIELAREVGKNYSQRAKIEKEQNENYKAKKDAELECEKLGLKINSKNILKLRLFKEQKEFCAYSGEKIKISDLQDEKMLEIDHIYPYSRSFDDSYMNKVLVFTKQNQEKLNQTPFEAFGNDSAKWQKIEVLAKNLPTKKQKRILDKNYKDKEQKNFKDRNLNDTRYIARLVLNYTKDYLDFLPLSDDENTKLNDTQKGSKVHVEAKSGMLTSALRHTWGFSAKDRNNHLHHTIDAVIIAYANNSIVKAFSDFKKEQESNSAELYAKKISELDYKNKRKFFEPFSGFRQKVLDKIDEIFVSKPERKKPSGALHEETFRKEEEFYQSYGGKEGVLKALELGKIRKVNGKIVKNGDMFRVDIFKHKKTNKFYAVPIYTMDFALKVLPNKAVARSKKGEIKDWILMDENYEFCFSLYKDSLILIQTKDMQEPEFVYYNAFTSSTVSLIVSKHDNKFETLSKNQKILFKNANEKEVIAKSIGIQNLKVFEKYIVSALGEVTKAEFRQREDFKK

SEQ ID NO: 137 - protein, 987 aa, Campylobacter jejuni
  Campylobacter jejuni subsp. jejuni CF93-6
MARILAFDIGISSIGWAFSENDELKDCGVRIFTKVENPKTGESLALPRRLARSARKRLARRKARLNHLKHLIANEFKLNYEDYQSFDESLAKAYKGSLISPYELRFRALNELLSKQDFARVILHIAKRRGYDDIKNSDDKEKGAILKAIKQNEEKLANYQSVGEYLYKEYFQKFKENSKEFTNVRNKKESYERCIAQSFLKDELKLIFKKQREFGFSFSKKFEEEVLSVAFYKRALKDFSHLVGNCSFFTDEKRVPKNSPLAFMFVALTRIINLLNNLKNTEGILYTKDDLNALLNEVLKNGTLTYKQTKKLLGLSDDYEFKGEKGTYFIEFKKYKEFIKALGEHNLSQDDLNEIAKDITLIKDEIKLKKALAKYDLNQNQIDSLSKLEFKDHLNISFKALKLITPLMLEGKKYDEACNELNLKVAINEDKKDFLPAFNETYYKDEVTNPVVLRAIKEYRKVLNALLKKYGKVHKINIELAREVGKNHSQRAKIEKEQNENYKAKKDAELECEKLGLKINSKNILKLRLFKEQKEFCAYSGEKIKISDLQDEKMLEIDHIYPYSRSFDDSYMNKVLVFTKQNQEKLNQTPFEAFGNDSAKWQKIEVLAKNLPTKKQKRILDKNYKDKEQKNFKDRNLNDTRYIARLVLNYTKDYLDFLPLSDDENTKLNDTQKGSKVHVEAKSGMLTSALRHTWGFSAKDRNNHLHHAIDAVIIAYANNSIVKAFSDFKKEQESNSAELYAKKISELDYKNKRKFFEPFSGFRQKVLDKIDEIFVSKPERKKPSGALHEETFRKEEEFYQSYGGKEGVLKALELGKIRKVNGKIVKNGDMFRVDIFKHKKTNKFYGVPIYTMDFALKVLPNKAVARSKKGEIKDWILMDENYEFCFSLYKDSLILIQTKDMQEPEFVYYNAFTSSTVSLIVSKHDNKFETLSKNQKILFKNANEKEVIAKSIGIQNLKVFEKYIVSALGEVTKAEFRQREDFKNELR

SEQ ID NO: 138 - protein, 984 aa, Campylobacter jejuni
  Campylobacter jejuni subsp. jejuni CG8486
MARILAFDIGISSIGWAFSENDELKDCGVRIFTKAENPKTGESLALPRRLARSARKRLARRKARLNHLKHLIANEFKLNYEDYQSFDESLAKAYKGSLISPYELRFRALNELLSKQDFARVILHIAKRRGYDDIKNSDDKEKGAILKAIKQNEEKLANYQSVGEYLYKEYFQKFKENSKEFTNVRNKKESYERCIAQSFLKDELKLIFKKQREFGFSFSKKFEEEVLSVAFYKRALKDFSHLVGNCSFFTDEKRAPKNSPLAFMFVALTRIINLLNNLKNTEGILYTKDDLNALLNEVLKNGTLTYKQTKKLLGLSDDYEFKGEKGTYFIEFKKYKEFIKALGDHSLSQDDLNEIAKDITLIKDEIKLKKALAKYDLNQNQIDSLSKLEFKDHLNISFKALKLITPLMLEGKKYDEACNELNLKVAINEDKKDFLPAFNETYYKDEVTNPVVLRAIKEYRKVLNALLKKYGKVHKINIELAREVGKNYSQRAKIEKEQNENYKAKKDAELECEKLGLKINSKNILKLRLFKEQKEFCAYSGEKIKISDLQDEKMLEIDHIYPYSRSFDDSYMNKVLVFTKQNQEKLNQTPFEAFGNDSAKWQKIEVLAKNLPTKKQKRILDKNYKDKEQKDFKDRNLNDTRYIARLVLNYTKDYLDFLPLSDDENTKLNDTQKGSKVHVEAKSGMLTSALRHTWGFSAKDRNNHLHHAIDAVIIAYANNSIVKAFSDFKKEQESNSAELYAKKISELDYKNKRKFFEPFSGFRQKVLDKIDEIFVSKPERKKPSGALHEETFRKEEEFYQSYGGKEGVLKALELGKIRKVNGKIVKNGDMFRVDIFKHKKTNKFYAVPIYTMDFALKVLPNKAVARSKKGEIKDWILMDENYEFCFSLYKDSLILIQTKDMQEPEFVYYNAFTSSTVSLIVSKHDNKFETLSKNQKILFKNANEKEVIAKSIGIQNLKVFEKYIVSALGEVTKAEFRQREDFKK

SEQ ID NO: 139 - protein, 984 aa, Campylobacter jejuni
  Campylobacter jejuni subsp. jejuni HB93-13
MARILAFDIGISSIGWAFSENDELKDCGVRIFTKVENPKTGESLALPRRLARSARKRLARRKARLNHLKHLIANEFKLNYEDYQSFDESLAKAYKGSLISPYELRFRALNELLSKQDFARVILHIAKRRGYDDIKNSDDKEKGAILKAIKQNEEKLANYQSVGEYLYKEYFQKFKENSKEFTNVRNKKESYERCIAQSFLKDELKLIFKKQREFGFSFLKKFEEEVLSVAFYKRALKDFSHLVGNCSFFTDEKRAPKNSPLAFMFVALTRIINLLNNLKNTEGILYTKDDLNALLNEVLKNGTLTYKQTKKLLGLSDDYEFKGEKGTYFIEFKKYKEFIKALGEHNLSQDDLNEIAKDITLIKDEIKLKKALAKYDLNQNQIDSLSKLEFKDHLNISFKALKLITPLMLEGKKYDEAYNELNLKVAINEDKKDFLPAFNETYYKDEVTNPVVLRAIKEYRKVLNALLKKYGKVHKINIELAREVGKNHSQRAKIEKEQNENYKAKKDAELECEKLGLKINSKNILKLRLFKEQKEFCAYSGEKIKISDLQDEKMLEIDHIYPYSRSFDDSYMNKVLVFTKQNQEKLNQTPFEAFGNDSAKWQKIEVLAKNLPTKKQKRILDKNYKDKEQKDFKDRNLNDTRYIARLVLNYTKDYLDFLPLSDDENTKLNDTQKGSKVHVEAKSGMLTSALRHTWGFSAKDRNNHLHHAIDAVIIAYANNSIVKAFSDFKKEQESNSAELYAKKISELDYKNKRKFFEPFSGFRQKVLDKIDEIFVSKPERKKPSGALHEETFRKEEEFYQSYGGKEGVLKALELGKIRKVNGKIVKNGDMFRVDIFKHKKTNKFYAVPIYTMDFALKVLPNKAVARSKKGEIKDWILMDENYEFCFSLYKDSLILIQTKDMQEPELVYFNAFTSSTVSLIVSKHDNKFETLSKNQKILFKNANEKEVIAKSIGIQNLKVFEKYIVSALGEVTKAEFRQREDFKK

SEQ ID NO: 140 - protein, 987 aa, Campylobacter jejuni
  Campylobacter jejuni subsp. jejuni LMG 23210
MARILAFDIGISSIGWAFSENDELKDCGVRIFTKAENPKTGESLALPRRLARSARKRLARRKARLNHLKHLIANEFKLNYEDYQSFDESLAKAYKGSLISPYELRFRALNELLSKQDFARVILHIAKRRGYDDIKNSDDKEKGAILKAIKQNEEKLANYQSVGEYLYKEYFQKFKENSKEFTNVRNKKESYERCIAQSFLKDELKLIFKKQREFGFSFSKKFEEEVLSVAFYKRALKDFSHLVGNCSFFTDEKRAPKNSPLAFMFVALTRIINLLNNLKNTEGILYTKDDLNALLNEVLKNGTLTYKQTKKLLGLSDDYEFKGEKGTYFIEFKKYKEFIKALGDHSLSQDDLNEIAKDITLIKDEIKLKKALVKYDLNQNQIDSLSKLEFKDHLNISFKALKLITPLMLEGKKYDEACNELNLKVAINEDKKDFLPAFNETYYKDEVTNPVVLRAIKEYRKVLNALLKKYGKVHKINIELAREVGKNYSQRAKIEKEQNENYKAKKDAELECEKLGLKINSKNILKLRLFKEQKEFCAYSGEKIKISDLQDEKMLEIDHIYPYSRSFDDSYMNKVLVFTKQNQEKLNQTPFEAFGNDSAKWQKIEVLAKNLPTKKQKRILDKNYKDKEQKDFKDRNLNDTRYIARLVLNYTKDYLDFLPLSDDENTKLNDTQKGSKVHVEAKSGMLTSALRHTWGFSAKDRNNHLHHAIDAVIIAYANNSIVKAFSDFKKEQESNSAELYAKKISELDYKNKRKFFEPFSGFRQKVLDKIDEIFVSKPERKKPSGALHEETFRKEEEFYQSYGGKEGVLKALELGKIRKVNGKIVKNGDMFRVDIFKHKKTNKFYAVPIYTMDFALKVLPNKAVARSKKGEIKDWILMDENYEFCFSLYKDSLILIQTKDMQEPELVYFNAFTSSTVSLIVSKHDNKFETLSKNQKILFKNANEKEVIAKSIGIQNLKVFEKYIVSALGEVTKAEFRQREDFKNELR

SEQ ID NO: 141 - protein, 984 aa, Campylobacter jejuni
  Campylobacter jejuni subsp. jejuni LMG 23211
MARILAFDIGISSIGWAFSENDELKDCGVRIFTKAENPKTGESLALPRRLARSARKRLARRKARLNHLKHLIANEFKLNYEDYQSFDESLAKAYKGSLISPYELRFRALNELLSKQDFARVILHIAKRRGYDDIKNNGDEEKSEILKAIKQNEEKLVNYQSVGEYLYKEYFQKFKENSKEFINVRNKKESYERCITQSFLKDELKLIFQKQREFGFSFSKKFEEEVLSVAFYKRALKDFSHLVGNCSFFTDEKRAPKNSPLAFMFVALTRIINLLNNLKNTEGILYTKDDLNALLNEVLKNGTLTYKQTKKLLGLSDDYEFKGEKGTYFIEFKKYKEFIKALDEHSLSQDDLNEIAKDITLIKDEIKLKKALAKYDLNQNQIDSLSKLEFKDHLNISFKALKLITPLMLEGKKYDEACNELNLKVAINEDKKDFLPAFNETYYKDEVTNPVVLRAIKEYRKILNALLKKYGKVHKINIELAREVGKNHSQRAKIEKEQNENYKAKKDAEIECEKLGLKINSKNILKLRLFKEQKEFCAYSGEKIKISDLQDEKMLEIDHIYPYSRSFDDSYMNKVLVFTKQNQEKLNKTPFEAFGNDGVKWQKIEVLAKNLPEKKQKRILDKNYKDKEQKDFKDRNLNDTRYIARLVLNYTKDYLDFLPLSDDENTKLNDTQKGSKVHVEAKSGMLTSALRHTWGFSTKDRNNHLHHAIDAAIIAYANNSIVKAFSDFKKEQESNSAELYAKKISELDYKNKRKFFEPFSGFRQKVLDKIDEIFVSKPERKKPSGALHEETFRKEEEFYQSYGGKEGVLKALELGKIRKVNGKIVKNGDMFRVDIFKHKKTNKFYAVPIYTMDFALKVLPNKAVARSKKGEIKDWILMDENYEFCFSLYKDSLILIQTKDMQEPELVYFNAFTSSTVSLVVSKHDNKFETLSKNQKILFKNANEKEVIAKSIGIQNLKVFEKYIVSALGEVTKAEFRQREDFKK

SEQ ID NO: 142 - protein, 984 aa, Campylobacter jejuni
  Campylobacter jejuni subsp. jejuni LMG 23263
MARILAFDIGISSIGWAFSENDELKDCGVRIFTKAENPKTGESLALPRRLARSARKRLARRKARLNHLKHLIANEFKLNYEDYQSFDESLAKAYKGSLISPYELRFRALNELLSKQDFARVILHIVKRRGYDDIKNSDDKEKGAILKAIKQNEEKLANYQSVGEYLYKEYFQKFKENSKEFTNVRNKKESYERCIAQSFLKDELKLIFKKQREFGFSFSKKFEEEVLSVAFYKRALKDFSHLVGNCSFFTDEKRAPKNSPLAFMFVALTRIINLLNNLKNTEGILYTKDDLNTLLNEVLKNGTLTYKQTKKLLGLSDDYEFKGEKGTYFIEFKKYKEFIKALGDHSLSQDDLNEIAKDITLIKDEIKLKKALAKYDLNQNQIDSLSKLEFKDHLNISFKALKLITPLMLEGKKYDEACNELNLKVAINEDKKDFLPAFNETYYKDEVTNPVVLRAIKEYRKVLNALLKKYGKVHKINIELAREVGKNHSQRAKIEKEQNENYKAKKDAEFECEKLGLKINSKNILKLRLFKEQKEFCAYSGEKIKISDLQDEKMLEIDHIYPYSRSFDDSYMNKVLVFTKQNQEKLNKTPFEAFGNDSAKWQKIEVLAKNLPTKKQKRILDKNYKDKEQKDFKDRNLNDTRYIARLVLNYTKDYLDFLPLSDDENTKLNDTQKGSKVHVEAKSGMLTSALRHTWGFSTKDRNNHLHHAIDAVIIAYANNSIVKAFSDFKKEQESNSAELYAKKISELDYKNKRKFFEPFSGFRQKVLDKIDEIFVSKPERKKPSGALHEETFRKEEEFYQSYGGKEGVLKALELGKIRKVNGKIVKNGDMFRVDIFKHKKTNKFYAVPIYTMDFALKVLPNKAVARSKKGEIKDWILMDENYEFCFSLYKDSLILIQTKDMQEPEFVYYNAFTSSTVSLIVSKHDNKFETLSKNQKILFKNANEKEVIAKSIGIQNLKVFEKYIVSALGEVTKAEFRQREDFKK

SEQ ID NO: 143 - protein, 984 aa, Campylobacter jejuni
  Campylobacter jejuni subsp. jejuni LMG 23264
MARILAFDIGISSIGWAFSENDELKDCGVRIFTKVENPKTGESLALPRRLARSARKRLARRKARLNHLKHLIANEFKLNYEDYQSFDESLAKAYKGSLISPYELRFRALNELLSKQDFARVILHIAKRRGYDDIKNSDDKEKGAILKAIKQNEEKLANYQSVGEYLYKEYFQKFKENSKEFTNVRNKKESYERCIAQSFLKDELKLIFKKQREFGFSFSKKFEEEVLSVAFYKRALKDFSHLVGNCSFFTDEKRAPKNSPLAFMFVALTRIINLLNNLKNTEGILYTKDDLNALLNEVLKNGTLTYKQTKKLLGLSDDYEFKGEKGTYFIEFKKYKEFIKALGEHNLSQDDLNEIAKDITLIKDEIKLKKALAKYDLNQNQIDSLSKLEFKDHLNISFKALKLITPLMLEGKKYDEACNELNLKVAINEDKKDFLPAFNETYYKDEVTNPVVLRAIKEYRKVLNALLKKYGKVHKINIELAREVGKNHSQRAKIEKEQNENYKAKKDAELECEKLGLKINSKNILKLRLFKEQKEFCAYSGEKIKISDLQDEKMLEIDHIYPYSRSFDDSYMNKVLVFTKQNQEKLNKTPFEAFGNDSAKWQKIEVLAKNLPTKKQKRILDKNYKDKEQKDFKDRNLNDTRYIARLVLNYTKDYLDFLPLSNDENTKLNDTQKGSKVHVEAKSGMLTSALRHTWGFSTKDRNNHLHHAIDAVIIAYANNSIVKAFSDFKKEQESNSAELYAKKISELDYKNKRKFFEPFSGFRQKVLDKIDEIFVSKPERKKPSGALHEETFRKEEEFYQSYGGKEGVLKALELGKIRKVNGKIVKNGDMFRVDIFKHKKTNKFYAVPIYTMDFALKVLPNKAVARSKKGEIKDWILMDENYEFCFSLYKDSLILIQTKDMQEPEFVYYNAFTSSTVSLIVSKHDNKFETLSKNQKILFKNANEKEVIAKSIGIQNLKVFEKYIVSALGEVTKAEFRQREDFKK

SEQ ID NO: 144 - protein, 987 aa, Campylobacter jejuni
  Campylobacter jejuni subsp. jejuni LMG 23269
MARILAFDIGISSIGWAFSENDELKDCGVRIFTKAENPKTGESLALPRRLARSARKRLARRKARLNHLKHLIANEFKLNYEDYQSFDESLAKAYKGSLISPYELRFRALNELLSKQDFARVILHIAKRRGYDDIKNNGDEEKSEILKAIKQNEEKLVNYQSVGEYLYKEYFQKFKENSKEFINVRNKKESYERCIAQSFLKDELKLIFQKQREFGFSFSKKFEEEVLSVAFYKRALKDFSHLVGNCSFFTDEKRAPKNSPLAFMFVALTRIINLLNNLKNTEGILYTKDDLNTLLNEVLKNGTLTYKQTKKLLGLSDDYEFKGEKGTYFIEFKKYKEFIKALGEHNLSQDNLNEIAKDITLIKDEIKLKKALAKYDLNQNQIDSLSKLEFKDHLNISFKALKLITPLMLEGKKYDEAYNELNLKVAINEDKKDFLPAFNETYYKDEVTNPVVLRAIKEYRKVLNALLKKYGKVHKINIELAREVGKNHSQRAKIEKEQNENYKAKKDAELECEKLGLKINSKNILKLRLFKEQKEFCAYSGEKIKISDLQDEKMLEIDHIYPYSRSFDDSYMNKVLVFTKQNQEKLNQTPFEAFGNDSAKWQKIEVLAKNLPTKKQKRILDKNYKDKEQKDFKDRNLNDTRYIARLVLNYTKDYLDFLPLSDDENTKLNDTQKGSKVHVEAKSGMLTSALRHTWGFSAKDRNNHLHHAIDAVIIAYANNSIVKAFSDFKKEQESNSAELYAKKISELDYKNKRKFFEPFSGFRQKVLDKIDEIFVSKPERKKPSGALHEETFRKEEEFHQSYGGKEGVLKALELGKIRKVNGKIVKNGDMFRVDIFKHKKTNKFYAVPIYTMDFALKVLPNKAVVQGKDKKSGLIKDWILMDENYEFCFSLYKDSLILIQTKDMQEPELVYFNAFTSSTVSLIVSKHDNKFETLSKNQKILFKNANEKEVIAKSIGIQNLKVFEKYIVSALGEVTKAEFRQREDFKK

SEQ ID NO: 145 - protein, 987 aa, Campylobacter jejuni
  Campylobacter jejuni subsp. jejuni LMG 23357
MARILAFDIGISSIGWAFSENDELKDCGVRIFTKAENPKTGESLALPRCLARSARKRLARRKARLNHLKHLIANEFKLNYEDYQSFDESLAKAYKGSLISPYELRFRALNELLSKQDFARVILHIAKRRGYDDIKNNGDEEKGEILKAIKQNEEKLVSYQSVGEYLYKEYFQKFKENSKEFINVRNKKESYERCIAQSFLKDELKLIFQKQRKFGFSFSKKFEEEVLSVAFYKRALKDFSHLVGNCSFFTDEKRAPKNSPLAFMFVALTRIINLLNNLKNTEGILYTKDDLNTLLNEVLKNGTLTYKQTKKLLGLSNDYEFKGEKGTYFIEFQKYKEFVKALGEHNLSQDDLNEIAKDITLIKDEIKLKKALAKYDLNQNQIDSLSKLEFKDHLNISFKALKLITPLMLEGKKYDEACNELNLKVAINEDKKDFLPAFNETYYKDEVTNPVVLRAIKEYRKVLNALLKKYGKVHKINIELAREVGKNHSQRAKIEKEQNENYKAKKDAELECEKLGLKINSKNILKLRLFKEQKEFCVYSGEKIKISDLQDEKMLEIDHIYPYSRSFDDSYMNKVLVFTKQNQEKLNKTPFETFGNDRVKWQKIEVLAKNLPTKKQKRILDKNYKDKEQKDFKDRNLNDTRYIARLVLNYTKDYLDFLPLSDDENTKLNDTQKGSKVHVEAKSGMLTSTLRHTWGFSTKDRNNHLHHAIDAAIIAYANNSIVKAFSDFKKEQESNTAELYAKKISELDYKNKRKFFEPFSGFRQKLLDKIDEIFVSKPERKKPSGALHEETFRKEEEFYQSYGGKEGVLKALELGKIRKVNGKIVSNGDMFRVDIFKHKKTNKFYAVPIYTMDFALKVLPNKAVVQGKDKKSGLIKDWILMDENYEFCFSLYKDSLILIQTKDMQEPELVYYERLDSSNASLTVSKHDNKFETLSKNQKILFKNANEKEVIAKSIGIQNLKVFEKYIVSALGEVTKAEFRQREDFKK

SEQ ID NO: 146 - protein, 984 aa, Campylobacter jejuni
  Campylobacter jejuni subsp. jejuni NCTC 11168 = ATCC 700819
MARILAFDIGISSIGWAFSENDELKDCGVRIFTKVENPKTGESLALPRRLARSARKRLARRKARLNHLKHLIANEFKLNYEDYQSFDESLAKAYKGSLISPYELRFRALNELLSKQDFARVILHIAKRRGYDDIKNSDDKEKGAILKAIKQNEEKLANYQSVGEYLYKEYFQKFKENSKEFTNVRNKKESYERCIAQSFLKDELKLIFKKQREFGFSFSKKFEEEVLSVAFYKRALKDFSHLVGNCSFFTDEKRAPKNSPLAFMFVALTRIINLLNNLKNTEGILYTKDDLNALLNEVLKNGTLTYKQTKKLLGLSDDYEFKGEKGTYFIEFKKYKEFIKALGEHNLSQDDLNEIAKDITLIKDEIKLKKALAKYDLNQNQIDSLSKLEFKDHLNISFKALKLVTPLMLEGKKYDEACNELNLKVAINEDKKDFLPAFNETYYKDEVTNPVVLRAIKEYRKVLNALLKKYGKVHKINIELAREVGKNHSQRAKIEKEQNENYKAKKDAELECEKLGLKINSKNILKLRLFKEQKEFCAYSGEKIKISDLQDEKMLEIDHIYPYSRSFDDSYMNKVLVFTKQNQEKLNQTPFEAFGNDSAKWQKIEVLAKNLPTKKQKRILDKNYKDKEQKNFKDRNLNDTRYIARLVLNYTKDYLDFLPLSDDENTKLNDTQKGSKVHVEAKSGMLTSALRHTWGFSAKDRNNHLHHAIDAVIIAYANNSIVKAFSDFKKEQESNSAELYAKKISELDYKNKRKFFEPFSGFRQKVLDKIDEIFVSKPERKKPSGALHEETFRKEEEFYQSYGGKEGVLKALELGKIRKVNGKIVKNGDMFRVDIFKHKKTNKFYAVPIYTMDFALKVLPNKAVARSKKGEIKDWILMDENYEFCFSLYKDSLILIQTKDMQEPEFVYYNAFTSSTVSLIVSKHDNKFETLSKNQKILFKNANEKEVIAKSIGIQNLKVFEKYIVSALGEVTKAEFRQREDFKK

SEQ ID NO: 147 - protein, 983 aa, Campylobacter jejuni
  Campylobacter jejuni subsp. jejuni NW
MARILAFDIGISSIGWAFSENDELKDCGVRIFTKAENPKTGESLALPRRLARSARKRLARRKARLNHLKHLIANEFKLNYEDYQSFDESLAKAYKGSLISPYELRFRALNELLSKQDFARVILHIAKRRGYDDIKNSDDKEKGAILKAIKQNEEKLANYQSVGEYLYKEYFQKFKENSKEFTNVRNKKESYERCIAQSFLKDELKLIFKKQREFGFSFSKKFEEEVLSVAFYKRALKDFSHLVGNCSFFTDEKRAPKNSPLAFMFVALTRIINLLNNLKNTEGILYTKDDLNALLNEVLKNGTLTYKQTKKLLGLSDDYEFKGEKGTYFIEFKKYKEFIKALGEHNLSQDDLNEIAKDITLIKDEIKLKKALAKYDLNQNQIDSLSKLEFKDHLNISFKALKLVTPLMLEGKKYDEACNELNLKVAINEDKKDFLPAFNETYYKDEVTNPVVLRAIKEYRKVLNALLKKYGKVHKINIELAREVGKNHSQRAKIEKEQNENYKAKKDAELECEKLGLKINSKNILKLRLFKEQKEFCAYSGEKIKISDLQDEKMLEIDHIYPYSRSFDDSYMNKVLVFTKQNQEKLNQTPFEAFGNDSAKWQKIEVLAKNLPTKKQKRILDKNYKDKEQKNFKDRNLNDTRYIARLVLNYTKDYLDFLPLSDDENTKLNDTQKGSKVHVEAKSGMLTSALRHTWGFSAKDRNNHLHHAIDAVIIAYANNSIVKAFSDFKKEQESNSAELYAKKISELDYKNKRKFFEPFSGFRQKVLDKIDEIFVSKPERKKPSGALHEETFRKEEFYQSYGGKEGVLKALELGKIRKVNGKIVKNGDMFRVDIFKHKKTNKFYAVPIYTMDFALKVLPNKAVARSKKGEIKDWILMDENYEFCFSLYKDSLILIQTKDMQEPEFVYYNAFTSSTVSLIVSKHDNKFETLSKNQKILFKNANEKEVIAKSIGIQNLKVFEKYIVSALGEVTKAEFRQREDFKK

SEQ ID NO: 148 - protein, 987 aa, Campylobacter jejuni
MARILAFDIGISSIGWAFSENDELKDCGVRIFTKAENPKTGESLALPRRLARSARKRLARRKARLNHLKHLIANEFKLNYEDYQSFDESLAKAYKGSLISPYELRFRALNELLSKQDFARVILHIAKRRGYDDIKNNGDEEKSEILKAIKQNEEKLVNYQSVGEYLYKEYFQKFKENSKEFINVRNKKESYERCIAQSFLKDELKLIFQKQREFGFSFSKKFEEEVLSVAFYKRALKDFSHLVGNCSFFTDEKRAPKNSPLAFMFVALTRIINLLNNLKNTEGILYTKDDLNTLLNEVLKNGTLTYKQTKKLLGLSDDYEFKGEKGTYFIEFKKYKEFIKALGEHNLSQDNLNEIAKDITLIKDEIKLKKALAKYDLNQNQIDSLSKLEFKDHLNISFKALKLITPLMLEGKKYDEAYNELNLKVAINEDKKDFLPAFNETYYKDEVTNPVVLRAIKEYRKVLNALLKKYGKVHKINIELAREVGKNHSQRAKIEKEQNENYKAKKDAELECEKLGLKINSKNILKLRLFKEQKEFCAYSGEKIKISDLQDEKMLEIDHIYPYSRSFDDSYMNKVLVFTKQNQEKLNQTPFEAFGNDSAKWQKIEVLAKNLPTKKQKRILDKNYKDKEQKDFKDRNLNDTRYIARLVLNYTKDYLDFLPLSDDENTKLNDTQKGSKVHVEAKSGMLTSALRHTWGFSAKDRNNHLHHAIDAVIIAYANNSIVKAFSDFKKEQESNSAELYAKKISELDYKNKRKFFEPFSGFRQKVLDKIDEIFVSKPERKKPSGALHEETFRKEEEFYQSYGGKEGVLKALELGKIRKVNGKIVKNGDMFRVDIFKHKKTNKFYPVPIYTMDFALKVLPNKAVVQGKDKKSGLIKDWILMDENYEFCFSLYKDSLILIQTKDMQEPELVYFNAFTSSTVSLIVSKHDNKFETLSKNQKILFKNANEKEVIAKSIGIQNLKVFEKYIVSALGEVTKAEFRQREDFKK

SEQ ID NO: 149 - protein, 1003 aa, Campylobacter lari
MRILGFDIGINSIGWAFVENDELKDCGVRIFTKAENPKNKESLALPRRNARSSRRRLKRRKARLIAIKRILAKELKLNYKDYVAADGELPKAYEGSLASVYELRYKALTQNLETKDLARVILHIAKHRGYMNKNEKKSNDAKKGKILSALKNNALKLENYQSVGEYFYKEFFQKYKKNTKNFIKIRNTKDNYNNCVLSSDLEKELKLILEKQKEFGYNYSEDFINEILKVAFFQRPLKDFSHLVGACTFFEEEKRACKNSYSAWEFVALTKIINEIKSLEKISGEIVPTQTINEVLNLILDKGSITYKKFRSCINLHESISFKSLKYDKENAENAKLIDFRKLVEFKKALGVHSLSRQELDQISTHITLIKDNVKLKTVLEKYNLSNEQINNLLEIEFNDYINLSFKALGMILPLMREGKRYDEACEIANLKPKTVDEKKDFLPAFCDSIFAHELSNPVVNRAISEYRKVLNALLKKYGKVHKIHLELARDVGLSKKAREKIEKEQKENQAVNAWALKECENIGLKASAKNILKLKLWKEQKEICIYSGNKISIEHLKDEKALEVDHIYPYSRSFDDSFINKVLVFTKENQEKLNKTPFEAFGKNIEKWSKIQTLAQNLPYKKKNKILDENFKDKQQEDFISRNLNDTRYIATLIAKYTKEYLNFLLLSENENANLKSGEKGSKIHVQTISGMLTSVLRHTWGFDKKDRNNHLHHALDAIIVAYSTNSIIKAFSDFRKNQELLKARFYAKELTSDNYKHQVKFFEPFKSFREKILSKIDEIFVSKPPRKRARRALHKDTFHSENKIIDKCSYNSKEGLQIALSCGRVRKIGTKYVENDTIVRVDIFKKQNKFYAIPIYAMDFALGILPNKIVITGKDKNNNPKQWQTIDESYEFCFSLYKNDLILLQKKNMQEPEFAYYNDFSISTSSICVEKHDNKFENLTSNQKLLFSNAKEGSVKVESLGIQNLKVFEKYIITPLGDKIKADFQPRENISLKTSKKYGLR

SEQ ID NO: 150 - protein, 1430 aa, Capnocytophaga canimorsus
MKHILGLDLGTNSIGWAVVKEAQNDNEQSEIVDVGVRVNPLTTDEKTNFEKGKPISTNADRTLKRSARRNLQRYKLRRKELIELLKEHQLISTDTILTENGKGTTFQTLELRAKSAKEKISLEELARVFLTINKKRGYKSSRKAKNEDEGQLIDGMEIAKRLYEENLTTGQLSLQLLKEGKKSLPDYYRSDLQFELDKVWNFQKQFHSHILTDEFYAQLKGKGQRATSALFLAKYQIYTAENKGSREDKKLQAYQWRVDALSKELTREQLAFVITEINNNLNNSSGYLGAISDRSKELYFNNETVGEYLWKQIAANPHTSLKNQVFYRQDYLDEFEQIWKTQSAFYPEILTDELKKELRDVVIFYQRKLKSQKSLVSFCEFENKEIEIKKEDGTSTKKVIGLKVAPKSSPLFQEFKIWQNLNNVLIRKKGSKTKKVDKNQQAVLFEEEKTIFELDLEAKQALFNELNLKGNLKAYYCLEILGYSPKEWEMNYSVLEGNRTNKALYEAYLKITDLEGYDAKNHLKVKLNKDEVELDDLKVPASEIKDMVQAIFKEAGINTDILHFNAELDGKDFENQASYQLWHLLYSYEGDDSKSGNELLYKLLETKFGFKKEYAQILANVSLSDDYGSLSTKAMRKIHPYIKENKFSTACELAGYRHSKHSLTKEENDNRVLKDSLEVLKKNSLRQPVVEKILNQMINLVNALLKKYRTENPNFKFDEIRIELARELKKNAEERANMTVNINKAKTEHEKIIKILKNEFGLPNPTRNDIIRYRLYEELKANGYKDLYTNEYIEKQDLFTKNIDIEHIIPKSRVFDDSFSNKTLSFRKTNLDKGERTAFDYIESKFGADKLEEYVARVEDLYKNNIISKAKYQKLLKKESEIGDGFVERDLRETQYIAKKAKEILLQITPNVLSTSGGITDRLREDWDLINVMKELNLPKYRALGLTQMEDRKYGQQVEVIIDWTKRNDHRHHAMDALTVAFTKHNHIQYLNYLNARKNEKHREHSNIMGIQQLETIKVTDKNGNEKRVFKAPMPNFRQVTKAFLENVLISHKAKNKVVTKNKNKVAGSNKVQEVLTPRGQLHKETVYGKYQYYVQKEEKIGGKFDLETIKKVANPLYQSLLKKRLEENGGDPKKAFTGKNSLAKNPIYLDDAQTEQLPEKVKLVWLENSFSIRKDITPENFKDEKLIDKILDEGVKRILKERLQSFGNDAKKAFSDLDKNPIWLNKEKGIAIKRVAISGVANAEPLHTKKDHLGKEILDKEGKSIPVDFISTGNNHHVAVYRDEKGNLQEKVVSVFEAVVRANQGLPIIDKTYNQHLGWEFLFTMKQNEMFVFSNESTGFNPNDIDLLDPKNKKIISPNLFRVQKFSKLQYGNSFVREFVFRHHLETTVEDRKELQGITYKQMKNSAFFNDIIKVRINHLGGIVSVGEY

SEQ ID NO: 151 - protein, 1436 aa, Capnocytophaga gingivalis
  Capnocytophaga gingivalis ATCC 33624
MKYIKYILGLDIGSNSIGWALIQLDLLQKTKRIIAAGSRIIPMDQKVLSDFGKGITISPTAQRTSYRNARHCRERHLLRRERLHRVLHILGFLPTHYDKQIDFSKRYGKFVDNTEPKIAYNEGKFLFMDSFQEMLSDFKSHQPDLFYTKKNGEESKIPYDWTIYYLRKKALSQKISKEELAWIILNFNQKRGYYQLREEEGNKENDFEIISSKIISVIKKDKDKKYNKYWYDIILENGLVYQAAFYNDFVYNWINQDREFIIERTSLKNGAEKVKLSYLPTFDEIDKMDKKEQDKYYKKIKIKTENSIGNKTVGCYIYDHILQNPNEKIKGKLVRTIERKYYKEELKAILEKQIALQPELFTDQLLADCIRELYSKNEAQQRNLAARDFVHLLVEDIIFYQRPLRRQKSTLANCSLESRSYIDKDSHTRKEAPLKVCPKSNPYYQEFRVLQWLQNLKIYEIDSDQEVTHQFIKTLEDKQQLFEFLMAQKEIDCEELLKYFLNQTYPNAKEKALKSELKKWKDTYRWNYVYDIGEKSSKKYPMNETRYELKRHLEKVANLPDDFLSSEVEYLLWHLIYSVKDKVAYEKGLKKFAQKHHLDKDSFVESFKKFNPYPSEYGSFSEKAIRKLLPLMRFGAHWDFNHIDKNTQKRIEDLITGVENEEIRTILREKAEKYQLEKETDFQDLPLWLAQYIVYNRHAEASSLEKWTSVNDLETYLNEFKQHSLRNPIVEQVVMETLRVVRDIWQQYGQGQASFFNEIHIELGRELKKTAKEREKLSKQNQKNEDINLSIKEKLKELEKYNTRAYSITHQEKYKLWLEQKHISPYTGQIISPENLFTDNYEIEHIIPQSRFFDDSLSNKVVCESIVNKAPYKDRQLGLEFIKNQGGRIVKELSKENKTIKIFTEEQYRTFIKEHYSNNPEKTKKLLLEEIPEKMVARQMNDTCYISKFISEILSKIVRSDEQDEGVHSKNVILCTGKITSILRQDWGLNDIWDNLILPRFERMNNLLQKEKFTIYSIEKQKKIPVVPINDQFKSFQKKRIDHRHHAMDAIIIACTTREHINYINNQHALEKEKDKKEKQEERDKLREKLCIKKYNNRSEGNYSWIFKKPWDTFTQEVRVALEDIVVSFKQNLRVINKATNYYERWVEENGKYIKKMVKQEGTNWAIRKPLHEETISGKIYLDREKITKNDILTATRKTVDSSFDDKRIKKITDTGIQKILLNYLKYKGSPEIAFSPEGLEELNKNLSIYNDGKPHKPIYKVRIYEKGSGRFALGEKGRKYKKYVQGASNLYFGIYQGAKRSFATIPLNEVIERQKQGLPSVPEYNEKGDLLLFSLSPNDLVYVPIEGEIIENIDFRNLSKEQKERIYNVNDFSSTCYFTPNRIAKAIFPKEVDLQRKGDKLSGSYDTKTASLEGIQIKEVCIKLKVDRLGNISKA

SEQ ID NO: 152 - protein, 1426 aa, Capnocytophaga ochracea
MKNILGLDLGTTSIGFAHIVEDENKEKSEIKELGVRIVSLTTDEQSDFEKGKSITTNANRTLKHGARLNLDRYQQRRKYLIDLLQKANLITPSSILAENGKNTTHSTWQLRAKAVTERIEKEEFARILLAINKKRGYKSSRKAKTEDEGQAIDGMAIAKRLYDENLTPGQLSLQLLQQNKKLLPDFYRSDLQKEFDLVWNFQKQFYPDILTDIFYKELQGKGKDATSKAFSKRYHFDTTENKGSKESVRLQAYQWRAEAISKQLSKEEVAYVLTEINNNLNNASGYLGAISDRSKELYFNRQTVGQYLYAKLQENRHNSLKNKVFYRQDYLDEFERIWETQASFHKELTDELKKQIRDVVIFYQRKPKSQKGLISFCEFESKEIEIEKDGKTITKNIGARVVPKSSPLFQEFKIWQILNNVICKRKGIRKKKISAKTTQLDLLNESSQTIFSLDMECKQLLFDELNLKGDLKSDKVLKLLGYSPQEWEINYNQLEGNRTQKALYEAYLKIVEMEAHDVKDILQIKSAKDDWSLDESPLSASEIREKVKAIFQTLGICTKILYFDPLLPVKEFEEQDSYQLWHLLYSYESDDSTSGNETLYRILEKKYAFKREHARILANVALQDDYGSLSTKAIRKIYPNIKENQYSTACEKAGYKHSKLSLTTEELEARELKNIIPLLKKNALRNPVVEKILNQMINVVNALIEKNSERDAEGKITKYFHFDEIRIELARELKKNAQKRYEMTQNINKAKLEHQKISEILQKEFGIKNPTKSDIIRYRLYQELEHNGYKELYTNAPIARDMLFSKNIEIEHIVPKARVFDDSFSNKTLTFHRINSDKGEYTAFDYITSLNSEEELNQYLTRVENAYKTKSISPTKYKNLLKKASEIGDDFINRDLRDTQYIAKKAKEILFQVTKNVLSTSGSITDRLREDWGLVDVMKELNMPKYQSLGLTEVEERKDGNKVTVIKNWTKRNDHRHHAMDALTVAFTKPSYIQYLNHLNARKDENNKNYSVILAIEEKETIKVPTNNGKNKRVFIEPIPNFRQVAKKHLEEIFISHKAKNKVVTKNTNKPAGTDKQQITLTPRGQLHKETIYGKYQYYINKEEKIGVKFDERTIAKVSNPVYREALLKRLQANDNDPKKAFAGKNALSKNPIYLDESKTKTLPEKVNLTYLEEDFSIRKDISPDNFKDLKSIEKVIDQGVKRILIKRLQAYDNDPKKAFVDLEKNPIWLNKEKGIAIKRVTISGVNNAQPLHIGKDHLGKTTLNKEGKEIPVDYVSTGNNHHVAIYRDKEGNLQEQIVSFFDAVVRAQQGIPIIDKTYKQAEGWQFLFTMKQNEMFVFPNATTGFNPAEIDLLDPKNKKLISPNLFRVQKIATKDYFFRHHLETNVETDNILKNVTWKREGLSGLKDIVKVRINHLGDIVSIGEY

SEQ ID NO: 153 - protein, 1437 aa, Capnocytophaga sp.
  Capnocytophaga sp. CM59
MKYIKYILGLDIGSNSIGWALIQLDLLQKTKRIIATGSRIIPMDQKVLSDFGKGITISPTAQRTSYRNARHCRERHLLRRERLHRVLHILGFLPTHYDKQIDFSKRYGKFVDNTEPKIAYNERKFLFMDSFQEMLADFKIHQPDLFYTKKNGEESKIPYDWTIYYLRKKALSRKISKEELAWIILNFNQKRGYYQLREEEEENKENDFEIISSKIISVIKKDKDKKYNKYWYDIILENGLVYQAAFYNDFVYNWINQDREFIIERISLKNGTEKVKLSYLPTFDEIDKMDKKEQDKYYKKIKIKTENSIGNKTVGCYIYDHILQNPNEKIKGKLVRTIERKYYKEELKAILEKQVALQPELFTDQLFADCIRELYSKNEAQQRNLAARDFVHLFVEDIIFYQRSLRRQKSTLANCSLESRSYIDKDSHTRKEAPLKVCPKSNPYYQEFRVLQWLQNLKIYEIDTDQEVTHEFIKTLEDKQQFFDFLMNQKEIDCEELLKYFLNQTYPNAREKALKSELKKWKDTYRWNYVYDIGEKSSKKYPMNETRYELKRHLEKVANLPDDFLSSEVEYLLWHLIYSVKDKVAYEKGLKTFAQKHHLDKDSFVESFKKFKPYPSEYGSFSEKAIRKLLPLMRFGSYWDFNHIDKNTQKRIEDLITGVENEEIRTILREKAEKYQLEKETDFQDLPLWLAQYIVYNRHAEASSLEKWTSVNDLETYLNEFKQYSLRNPIVEQVVMETLRVVRDIWQQYGQGQASFFDEIHIELGRELKKTAKEREKLSKQNQKNEDINLSIKEKLKELEKYNTRAYSITHQEKYKLWLEQKHISPYTGQIISPENLFTDNYEIEHIIPQSRFFDDSLSNKVVCESIVNKAPYKDRQLGLEFIKNQGGRIVKELSTENKTIKIFTEEQYRTFIKEHYSNNPEKTKKLLLEEIPEKMVARQMNDTCYISKFISEILSKIVRSDEQDEGVHSKNVILCTGKITSALKQDWGVNDVWNDLILPRFERMNDLTQSTLFTTYNEKYQKYLPTVPMEYSNGFQKKRIDHRHHAMDAIIIACATREHINYINNQHALEKGKDKKEKQKEHDKLREKLCIKKDNKGSEENYSWIFKKPWDTFTQEVQAALEGIVVSFKQNLRVINKATNYYERWVEENGKYIKKMVKQEGTNWAIRKPLHEETISGKIYLDREEITKNDILTATRKTVDSSFDEKRIKKITDTGIQKILLNYLKYKGSPEIAFSPEGLEELNKNLSIYNDGKPHKPIYKVRIYEKGSGRFALGEKGRKYKKYVQGAPNLYFGIYQGANKRSFATIPLNEVIERQKQGRPSIPEYNEKGDPLLFSLSPNDLVYVPVEGEIIEDIDFQNLSKEQKERIYNVNDFSSTCYFTPNRIAKAIFPKEVDLQRKGDKLPGSYDTKTASLEGIQIKEVCIKLKIDRLGNISKA

SEQ ID NO: 154 - protein, 1471 aa, Capnocytophaga sp.
  Capnocytophaga sp. oral taxon 324 str. F0483
MCKYFYIKNFITFVLSKSIIPMKHILGLDLGSNSIGWAFVQQDFENKQGKIIATGSRIIPMDQGILGDFERGNTVSQTAERTTYRSTRRLRERHLLRRERLHRVLHILGFLPPHYDAQIDFTKRYGKFIDNAEPKIAYNNGNFIFMNSFNEMIEDFKKHQPQLFYKKSNGEESKIPYDWTIYYLRKKALSQKITQQELAWLILHFNQKRGYYQLRGEEETENPNKEVAFHSLKVVDVEAEAPNKKGEIWYTIRLENGWIYRRTSKIPLDDWKGKTRDFIVTTDLNDDGTIKVDKEGKEKRSFRAPDENDWNLLKKKTEHDIDFSGKTVGAYIYDHLLQNPNQKIKGKLVRTIERKYYKDELKAILAKQIALQPELFTETLLADCIRELYRKNETQQQNLLSKDFLHLFVEDIIFYQRPLRSKKSTIANCTLEKRSYIDKETNERKDAPIKVCAKSNPYYQEFRVLQWLQNLRIYEIETDREVTAEFIETPQDCEALFNFLMSQKEIDNKGLLKYFLFAKNPQIKDKAAKSELKKWLTTYRWNYVYDAADNSSKKYPMNETGYELQRYLQKVEGLPANFLTFDITYQLWHLLYSVKDKVEFEKALKKFAKKKQLDKTSFVDSFKNFKPYPNEYGSFSEKAIKKLLPLMRFGNHWDFNRIDVSTQKRIDDLINGVANEDIRTIIREKAEKYQLNSETCFQDLPLWLAQYVVYNRHAEATDIEKWTSVSDLEAYLEDFKQHSLRNPIVEQVVTETLRVVRDIWQQYGGGQANFFDEIHIELGRELKKTAEERKQLSDKNQENESTNLRIKKLLAELKEDASIQNVRPYSLVQQELLKIYEEGVFSATDEVEEDIQKIRKKAEPSKADLQRYKLWLEQKYKSPYTGEVISLTKLFTEEYEIEHIIPQSRYYDDSLSNKVICESAVNKLKTNQLGLEFIQNHHGEKVRITANKEVTIFTEEQYKEFVKKHYANNSAKQQKLLLNEIPEKMVARQLNDTRYISKYISEILSKIVRSDEKDEGVNSKNIIPCTGKITTALKQDWGLNDVWNKLILPRFERMNQLTQTQLFTSYNDRLQKNLPTVPIEYSQGFQKKRIDHRHHAMDALVIACATREHINYMNNQHALDKSKDKKEKQQSRIDLRTILCEKKNNNWQFKKPWSTFTQEAKEALEHIVVSFKQNLRVINKATNYYEKWEEKNGVLVKKKVKQEGTNWAIRKPLHKETVSGKIVLDRKIGKDKILTATRKAVDITFTEKIISSITDTGIQKILLNYLKYKGSPEVAFSTEGLEELNKNIAQYNNGKKHQPIYKVRIFEEGSKFPLGETGAKATKYVEAAKGTNLFFGVYQGKGKRTYATIPLNEVIERQKQGLPSVPERNEKGEPLLFSLSPNDLVYVPMEGEIAETIDFNNLSKEQKERIYKTVSFTGNQCFFVQEAVATPIVNKMEYSPLNKMERDILGTMIKEVCIKLKVDRLGNITKA

SEQ ID NO: 155 - protein, 1450 aa, Capnocytophaga sp.
  Capnocytophaga sp. oral taxon 326 str. F0382
MKRILGLDLGSNSIGWAFVEQDFENKQGKIIATGSRIIPMDQGILGDFEKGNTVSQTAERTTYRSMRRLRERHLLRRERLHRVLHILGFLPPHYDAQIDFTKRYGKFIDNAEPKIAYNNGNFIFMNSFNEMIEDFKKYQPQLFYKKSNGEESKIPYDWTIYYLRKKVLSQKITQQELAWLILHFNQKRGYYQLRGEEETENPNKEVAFHSLKVVDVEAEAPNKKGEIWYTIRLENGWIYRRTSKIPLDDWKGKTRDFIVTTDLNDDGTIKVDKEGKEKRSFRAPDENDWNLLKKKTEHDIDFSGKTVGAYIYDHLLQNPNQKIKGKLVRTIERKYYKDELKAILAKQIALQPELFTETLLADCIRELYRKNETQQQNLLSKDFLHLFVEDIIFYQRPLRSKKSTIANCTLEKRSYIDKETNERKDTFIKVCAKSNPYYQEFRVLQWLQNLRIYEIETDREVTAEFIETAEDYEALFNFLMSQKEIDNEGLLKYFLFAKNPQIKDKVAKSELKKWLTTYRWNYVYDAADNSSKKYPMNETGYDLQRYLQKVEGLPANFLTFDITYRLWHLLYSVKDKVEFEKALKKFAQEYQLDEASFVDSFKNFKPYPNEYGSFSEKAIKKLLPLMRFGNHWDFNRIDVSTQKRIDDLINGVANDEIRTIIREKAEKYQLNSESCFQGLPLWLAQYVVYNRHAEATDIEKWTSVSDLETYLEDFKQHSLRNPIVEQVVTETLRVVRDIWQQYGGGQANFFDEIHIELGRELKKTAEERKQLSNRNQENENTNLRIKKLLAELKEDASIQNVRPYSPVQQELLKIYEEGVFSSTDQVEEDIQKIRKKAEPTTPEIQRYKLWLEQKYKSPYTGEVISLTKLFTEEYEIEHIIPQSRYYDDSLSNKVICESAVNKLKTNQLGLEFIQNHHGEKVRITGNKEVTIFTEEQYKEFVKKHYANNSAKQQKLLLNEIPEKMVARQLNDTRYISKYISEILSKIVRSDEKDEGVNSKNVIPCTGKITTALKQDWGLNDVWNELILPRFERMNQLTQTQLFTSYNDRFQKNLPTVPIEYSQGFQKKRIDHRHHAMDALVIACATREHINYMNNQHALDKNKDKKEKQQSRIDLRTILCEKKNNNWQFKKPWSTFTQETKEALEHIVVSFKQNLRVINKATNYYEKWEEKNGVLVKKKVKQEGTNWAIRKPLHKETVSGKIVLDRKIGKDKILTATRKEVDITFTEKIISSITDTGIQKILLNYLNYKGSPEVAFSAEGLEELNKNIAQYNDGKKHQPIYKVRIFEEGSKFPLGETGAKATKFVEAAKGTNLFFGVYQGKEKRSYATIPLNEVIERQKQGLPSVPERNEKGEPLLFSLSPNDLVYVPMEGEIAETIDFNNLSKEQKERIYKTVSFTGNQCFFVQEAVATPIVNKMEYSPLNKMERDILGTMIKEVCIKLKVDRLGNITKA

SEQ ID NO: 156 - protein, 1435 aa, Capnocytophaga sp.
  Capnocytophaga sp. oral taxon 329 str. F0087
MKNILGLDLGTTSIGFAHIVEDENKEKSEIKELGVRIVSLATDEQSDFEKGKSISTNANRTLKHGARLNLDRYQQRRKFLIDLLQKANLITSASILAENGKNTTHSTWQLRAKAVTERIEKEEFARVLLAINKKRGYKNSRKTKTEDEGQAIDGMAIAKCLYDENLTPGQLSLQLLQQNKKLLPDFYRSDLQKEFDLVWNLQKQFYPDILTDSFYKELQGKGKDATSKAFSKRYHFDTAENKGSKESVRLQAYQWRAEAISKQLSKEEVAYVLTEINNNLNNSSGYLGAISDRSKELYFNRQTVGQYLYAQLQENRHNSLKNKVFYRQDYLDEFERIWETQASFHKELTDELKKQIRDVVIFYQRKLKSQKGLVSFCEFESKEIEIEKDGKAITKSIGARVVPKSSPLFQEFKIWQILNNVTCKRKGIRKKKSSAKSTELDLFNEPSQSIFSLDMECKQLLFDELNLKGDLKSDKVLKLLGYSPQEWEINYNQLEGNRTQKSLYEAYLKIIEIEGYEVKDILQIKSTKDDWSLDESPLSASEIRERVKVIFQTLGICTKILYFDPLLPVKEFEQQYSYQLWHLLYSYESDDSTSGNETLYRILEKKYAFKREHATILANVALQDDYGSLSTKAIRKIYPYIKENQYSTACELAGYKHSKLSLTTEELEARELKNIIPLLKKNALRNPVVEKILNQMINVVNALIEKNSERDAEGKITKYFHFDEIRIELARELKKNAQERYEMTQNINKAKLEHQKISEKLQKQFGIKNPTKSDIIRYRLYQELEHNGYKELYTNTYIAPDVLFSKNIDIEHIVPKARVFDDSFSNKTLAFKEFNIKKGESTAFDYITSLNCEGELNQYLTRVENAYKTKSISLTKYKNLLKKASEIGDGFINRDLRDTQYIAKKAKEILFQVTKNVLSTSGSITDRLREDWGLVDVMKELNMPKYQSLGLTEVEERKDGNKVTVIKDWTKRNDHRHHAMDALTVAFTKPSYIQYLNHLNARKDENNKNYSVILAIEKKETIKVPINNGKNKRVFIEPILNFRQVAKKHLEEIFISHKAKNKVVTKNINKPAGTDKQQITLTPRGQLHKETIYGKYQYYVNKEEKVGVKFDERTITKVSNPLYREALLKRLQANDNDPKKAFAGKNALSKNPIYLDEAKTKTLPEKVNLTYLEEDFSIRKDISPDNFKDLKSIEKVIDQGVKRILIKRLQAYDNDPKKAFVDLEKNPIWLNKEKGIAIKRVTISGVSNAQPLHIGKDHLGKTTLNKEGKEVPVDYVSTGNNHHVAIYRDKEGNLQEQIVSFFEAVVRAQQGLPIIDKNYKQAEGWQFMFTMKQNEMFVFPNEATGFNPAEIDLLDPKNKKLISPNLFRVQTISIVKYGNSVVRDFKFRHHLETTLQDDKILQGITFQQIKSLEPLRNIVKVRINHLGDIVNIGEY

SEQ ID NO: 157 - protein, 1426 aa, Capnocytophaga sp.
  Capnocytophaga sp. oral taxon 335 str. F0486
MKNILGLDLGTTSIGFTHIVEDENKEKSEIKELGVRIVSLTTDEQSDFEKGKSISTNANRTLKHGARLNLDRYQQRRKFLIDLLQKANLITSSSILAENGKNTTHSTWQLRAKAVTERIEKEEFARVLLAINKKRGYKSSRKAKTEDEGQAIDGMAIAKRLYDENLTPGQLSLQLLQQNKKLLPDFYRSDLQKEFDLVWNFQKQFYPDILTDSFYKELQGKGKDATSKAFSKRYHFDTAENKGSRESVRLQAYQWRAEAISKQLSKEEVAYVLTEINNNLNNASGYLGAISDRSKELYFNRQTVGQYLYAQLQENKHNSLKNKVFYRQDYLDEFERIWETQASFHKELTEELKKQIRDVVIFYQRKLKSQKGLISFCEFESKEIEIEKDGKTITKSIGARVVPKSSPLFQEFKIWQILNNVTCKRKGIRKKKSSAKSTELDLFNEPSQTIFSLDMECKQLLFEELNLKGDLKSDKVLKLLGYSPQEWEINYNQLEGNRTQKALYEAYLKIVEMEAHDVKDILQIKSTKDDWALEESPLSASEIRERVKAIFQTLGICTKILYFDPLLPVKEFEEQDSYQLWHLLYSYESDDSTSGNETLYRILEKKYAFKREHATILANVTLQDDYGSLSTKAIRKIYPYIKENQYSTACEKAGYKHSKLSLTTEELEARELKNIIPLLKKNALRNPVVEKILNQMINVVNALIEKNSERDAEGKITKYFHFDEIRIELARELKKNAQERYEMTQNINKAKLEHQKISGILQKEFGIKNPTKSDITRYRLYQELAHNGYNDLYTNTYIPKELLFSKNIDIEHIVSKARVFDDSFSNKTLAFREFNIKKGESTAFDYITSLNNEEELNQYLNRVENAYKTKNISPAKYKNLLKKASEIGDGFINRDLRDTQYIAKKAKEILFQVTKNVLSTSGSITDRLREDWGLVDVMKELNMPKYQSLGLTEVEERKEGNKVTVIKNWTKRNDHRHHAMDALTVAFTKPSYIQYLNHLNARKDKNNKNYSVILAIEEKETIKVPTNNGKNKRVFIEPIPNFRQVAKKHLEEIFISHKAKNKVVTKNTNKPAGTDKQQITLTPRGQLHKETVYGKYQYYVNKEEKIGVKFDKETIAKVSNPVYREALLKRLQANDNDPKKAFAGKNALSKNPIYLDEAKTKTLTEKVNLTYLEEDFSIRKDISPDNFKDLKSIEKVIDQGVKRILIKRLQDYDNDPKKAFVDLEKNPIWLNKEKGIAIKRVTISGVNNAQPLHIGKDHLGKTTLNKEGKEIPVDYVSTGNNHHVAIYRDKEGNLQEQIVSFFEAVVGAQQGLPIVDKTYKQAEGWQFLFTMKQNEMFVFPNEATGFNPAEIDLLDPKNKKQISPNLFRVQKIATKDYFFRHHLETNVDTDNVLKNTTWKREGLSGLKDIVKVRINHLGDIVSIGEY

SEQ ID NO: 158 - protein, 1432 aa, Capnocytophaga sp.
  Capnocytophaga sp. oral taxon 380 str. F0488
MKNILGLDLGTTSIGFAHIVEDENKEKSEIKELGVRIVSLTTDEQSDFEKGKSITTNANRTLKHGARLNLDRYQQRRKYLIDLLHKANLITPSSILAENGKNTTHSTWQLRAKAVTERIEKEEFARILLAINKKRGYKSSRKAKTEDEGQAIDGMAIAKRLYDENLTPGQLSLQLLQQNKKLLPDFYRSDLQKEFDLVWNFQKQFYPDILTDIFYKELQGKGKDATSKAFSKRYHFDTAENKGSKESVRLQAYQWRAEAVSKQLSKEEVAYVLTEINNNLNNASGYLGAISDRSKELYFNRQTVGQYLYAQLQENRHNSLKNKVFYRQDYLDEFERIWETQALFHKELTDELKKQIRDVVIFYQRKPKSQKGLISFCEFESKEIEIEKDGKTITKNIGARVVPKSSPLFQEFKIWQILNNVICKRKGIRKKKISAKTTQLDLLNESSQTIFSLDMECKQLLFDELNLKGDLKSDKVLKLLGYSPQEWEINYNQLEGNRTQKALYEAYLKIVEMEAHDVKDILQIKSTKDDWSLDESPLSASEIRESVKAIFQALGICTKILYFDPLLPVKDFEEQDSYQLWHLLYSYESDDSTSGNETLYRILEKKYAFKREHARILANVALQDDYGSLSTKAIRKIYPNIKENQYSTACEMAGYKHSKLSLTTEELEARELKNIIPLLKKNALRNPVVEKILNQMINVVNALIEKNSERDAEGKITKYFHFDEIRIELARELKKNAQKRYEMTQNINKAKSEHQKISEILQKEFGIKNPTKSDIIRYRLYKELEHNGYKELYTNTYIAPDVLFSKNIDIEHIVPKARVFDDSFSNKTLAFKDFNIKKGESTAFDYITSLKNEEKLNQYLARVENAYKTKNISPAKYKNLLKKASEIGDGFINRDLRDTQYIAKKAKEILFQVTKNVLSTSGSITDRLREDWSLVDVMKELNMPKYQSLGLTEVEERKDGNKVTVIKDWTKRNDHRHHAMDALTVAFTKPSYIQYLNHLNARKDENNKNYSVILAIEKKETIKVPTNNGKNKRVFIEPIPNFRQVAKKHLEEIFISHKAKNKVVTKNTNKPAGTNKQQITLTPRGQLHKETIYGKYQYYVNKEEKVGVKFDKETIAKVSNPLYREALLKRLQANDNDPKKAFTGKNALSKNPIYLDEAKTKTLPEKVNLTYLEEDFSVRKKIVPKNPTSKEFVPNLKSIEKVVDEGVRNILIERLRVYNNDPEKAFVDLEKNPIWLNKEKGIAIKRVTISGVNNAQPLHIGKDHLGKTTLNKEGKEIPVDYVSTGNNHHVAIYRDKEGNLQEQIVSFFEAVVRTQQGLPIIDKTYKQEEGWQFLFTMKQNEMFVFPNEATGFNPAEIDLLDPKNKKQISPNLFRVQKIATKDYFFRHHLETNVETDNVLKNTTWKREGLSGLKDIVKVRINHLGDIVSIGEY

SEQ ID NO: 159 - protein, 1450 aa, Capnocytophaga sp.
  Capnocytophaga sp. oral taxon 412 str. F0487
MKHILGLDLGSNSIGWAFVQQDFENKQGKIIATGSRIIPMDQGILGDFERGNTVSQTAERTTYRNTRRLRERHLLRRERLHRVLHILGFLPPHYDSQIDFTKRYGKFIDNAEPKIAYNNGNFIFMNSFNEMIEDFKKYQPQLFYKKSNGEESKIPYDWTIYYLRKKALSQKITQQELAWLILHFNQKRGYYQLRGEEETENPNKEVAFHSLEVVDVEAEAPNKKGEIWYTIRLENGWIYRRTSKIPLDDWKGKTRDFIVTTDLNDDGTIKLDKEGKEKRSFRAPDENDWNLLKKKTEHDIDFSGKTVGAYIYDHLLQNPNQKIKGKLVRTIERKYYKDELKAILAKQIALQPELFTETLLADCIRELYRKNETQQQNLLSKDFLHLFVEDIIFYQRPLRSKKSTIANCTLEKRSYIDKETNERKDTPIKVCAKSNPYYQEFRVLQWLQNLRIYEIETDREVTAEFIETAQDNEALFNFLMSQKEIDNESLLKYFLFAKNPQIKDKVAKSELKKWLTTYRWNYVYDAADNSSKKYPMNETGYELQQYLQKVEGLPANFLTFDITYRLWHLLYSVKDKVEFEKALKKFAQEYQLDEASFVDSFKNFKPYPNEYGSFSEKAIKKLLPLMRFGNHWDFNRIDVSTQKRIDDLINGVANDEIRTIIREKAEKYQLNSETCFQGLPLWLAQYVVYNRHAEAADIEKWTSVNDLEAYLEDFKQHSLRNPIVEQVITETLRVVRDIWQRYGGGQANFFDEIHIELGRELKKTAEERKQLSNRNQENENTNLRIKKLLAELKEDASIQNVRPYSPVQQELLKIYEEGVFSATDEVEEDIQKIRKKAEPTTPEIQRYKLWLEQKYKSPYTGEVISLTKLFTEEYEIEHIIPQSRYYDDSLSNKVICESAVNKLKTNQLGLEFIQNHHGEKVRITANKEVTIFTEEQYKEFVKKHYANNSAKQQKLLLNEIPEKMVARQLNDTRYISKYISEILSKIVRSDEKDEGVNSKNIIPCTGKITTALKQDWGLNDVWNELILPRFERMNQLTQTQLFTSYNDRFQKNLPTVPIEYSQGFQKKRIDHRHHAMDALVIACATREHINYMNNQHALDKSKDKKEKQQSRIDLRTILCEKKNNNWQFKKPWSTFTQEAQEALEHIVVSFKQNLRVINKATNYYEKWEEKNGVLVKKKVKQEGTNWAIRKPLHKETVSGKIVLDRKIGKDKILTATRKSVDITFTEKIISSITDTGIQKILLNYLKYKGSPEVAFSAEGLEELNKNIAQYNDGKKHQPIYKVRIFEEGSKFPLGETGAKATKYVEAAKGTNLFFGVYQGKGKRTYATIPLNEVIERQKQGLPSVPERNEKGEPLLFSLSPNDLVYVPMEGEIAETIDFNNLSKEQKERIYKTVSFTGNQCFFVQEAVATPIVNKIEYSPLNKMERDILGTMIKEVCIKLKVDRLGNITKA

SEQ ID NO: 160 - protein, 1426 aa, Capnocytophaga sputigena
  Capnocytophaga sputigena ATCC 33612
MKNILGLDLGITSISFAHIVEDENKEKSEIKELGVRIVSLTTDEQSDFEKGKSITTNANRTLKHGARLNLDRYQQRRKYLIDLLQKANLITSSSILAENGKNTTHSTWQLRAKAVTERIEKEEFARVLLAINKKRGYKSSRKAKTEDEGQAIDGMAIAKRLYDENLTPGQLSLQLLQQNKKLLPDFYRSDLQREFDLVWNFQKQFYPDILTDSFYKELQGKGKDATSKAFSKRYHFDTAENKGSKESVRLQAYQWRAEAISKQLSKEEVAYVLTEINNNLNNASGYLGAISDRSKELYFNRQTVGQYLYAQLQENRHNSLKNKVFYRQDYLDEFERIWETQASFHKELTDELKKQIRDVVIFYQRKLKSQKGLISFCEFESKEIEIEKDGKTITKTIGARVVPKSSPLFQEFKIWQILNNVTCKRKGIRKKKSSAKSTELDLFNEPSQTIFSLDMECKQLLFDELNLKGDLKSDKVLKLLGYSPQEWEINYNQLEGNRTQKALYEAYLKIVEMEAHDVKDILQIKSAKDDWSLDESPLSASEIKEKVKDIFQALGICTKILYFDPLLPVKEFEKQDSYQLWHLLYSYESDDSTSGNETLYRILEKKYAFKREHARILANVALQDDYGSLSTKAIRKIYPNIKENQYSKACELAGYKHSKLSLTTEELEARELKNIIPLLKKNALRNPVVEKILNQMINVVNALIEKNSERDAEGKITKYFHFDEIRIELARELKKNAQKRYEMTQNINKAKLEHQKISEILQKKFGIKNPTKSDIIRYRLYQELEHNGYKELYTNAPIARDMLFSKNIEIEHIVPKARVFDDSFSNKTLTFHRINSNKGEYTAFDYITSLNSEEELNQYLTRVENAYKTKSISLTKYKNLLKKASEIGDGFINRDLRDTQYIAKKAKEILFQVTKNVLSTSGSITDRLREDWGLVDVMKELNMPKYQSLGLTEVEERKEGNKVTVIKNWTKRNDHRHHAMDALTVAFTKPSYIQYLNHLNARKDENNKNYSVILAIEEKETIKVPTNNGKNKRVFIEPIPNFRQVAKKHLEEIFISHKAKNKVVTKNVNKPAGTDKQQITLTPRGQLHKETIYGKYQYYVNKEEKVGVKFDERTITKVSNPLYREALLKRLQANDNDPKKAFTGKNALSKNPIYLDETKTKTLPEKVNLTYLEEDFSIRKDISPDNFKDLKSIEKVIDQGVKRILIKRLQDYDNDPKKAFVDLEKNPIWLNKEKGIAIKRVTISGVSNAQPLHIGKDHLGKTTLNKEGNEIPVDYVSTGNNHHVAIYRDKEGNLQEQIVSFFEAVVRTQQGLPIIDKTYKQEEGWQFLFTMKQNEMFVFPNATTGFNPAEIDLLDPKNKKLISPNLFRVQKIATKDYFFRHHLETNVETDNVLKNTTWKREGLSGLKDIVKVRINHLGDIVSIGEY

SEQ ID NO: 161 - protein, 1140 aa, Catellicoccus marimammalium
  Catellicoccus marimammalium M35/04/3
MKNMTKVNVGLDVGISSAGWSVINAETNQILESGVRLFSGSDADENVNRRNQRQGRRLFRRRKLRIQEAKKYLENVFQLKDIEPKDEWNPYEIRVRALNEKVSKEELSIALLNIVKHRGISYELEDVTDEEGTNTQSFQSGLDYNRRLLKTKTVGEIQYDRLQKYGQVRGQIQTEDGLLINIFPTKNYVEEVERILETQKKYHPEIDDVFIEKIISFVTRKREYFVGPGNEKSRTDYGIYRENGETLDNLFEILIGKDKFYPEEYRAAGSSYTAQIFNLLNDLNNLRIPTTEDHHLTKAQKEEIITELKNTSRLSGGMLKLISKVTKAPKEEISGYRKDEKDKPDLHSLAYYRKQKNMLEKEGIQIADFSEELLDELATMMTLNTEPGEIRKQLNKITNQYDILTPEVIEVLVKNHTAFVATSNHKWHRFSLKLMKEFIPELLETSKEQSTILCERGFIQNRASYLDENHHFNYAELRENLYNPVVRKSTCEMLKVFTAIQEKYPNIQNVIVELPRETNEDEQKRKIKKINDNNAKRKKEILKEAQAQSGLSEEALEEKLLKTKGLYLKLMLWYEQEGKCVYSGQEIPLSDLLQNKGGYEVDHIIPISISFDDRLCNKVLVRQQLNSQKSNQTPFEYMTTHTDGHLSFHELKELVGKNKRFSKEKRELLLAEIYSNDIETRKRFINRNLVDTSYTARIVLNALQQYKKENQLSMNVSVVRGAMTNILRKKVKLDKTRETFHHHAIDASLMAVIPNIEFFKERKEWLPKSANEEVVEVEVSEEETMPEKEFKVKMRLPESFIQDVQILQRNSFAKEEVSGPQTRERNLKIKFSHQVDQKMNRKVADDTIYGTRQAQLGKDKKEETYVIGKIKDIYNYDEYVRFKKRYDKNKESFLMYHHDPQTFEKLEEILAQYPEYIEDEKGKKKKVSPFALYREENGPVTKYAKKNNGPVIKQLKYYDSKLNRKIDISHKYSTKNRQVVLQSLKPYRTDVYRNQDTGEYTLVGIDQNDGKFVNGHYGIPKSRYEEIKANNKLSEHDEFVFSLYKNSMVKVIDENGESIVVRYLSRSMPNRKNNAEIKPVEKYQFEDGEVVPVYGKCRKQMQTVFVKKGWTLLKGNTDILGNTYFVEKESENPKKMIDDK

SEQ ID NO: 162 - protein, 1329 aa, Catenibacterium mitsuokai
  Catenibacterium mitsuokai DSM 15897
IVDYCIGLDLGTGSVGWAVVDMNHRLMKRNGKHLWGSRLFSNAETAANRRASRSIRRRYNKRRERIRLLRAILQDMVLEKDPTFFIRLEHTSFLDEEDKAKYLGTDYKDNYNLFIDEDFNDYTYYHKYPTIYHLRKALCESTEKADPRLIYLALHHIVKYRGNFLYEGQKFNMDASNIEDKLSDIFTQFTSFNNIPYEDDEKKNLEILEILKKPLSKKAKVDEVMTLIAPEKDYKSAFKELVTGIAGNKMNVTKMILCEPIKQGDSEIKLKFSDSNYDDQFSEVEKDLGEYVEFVDALHNVYSWVELQTIMGATHTDNASISEAMVSRYNKHHDDLKLLKDCIKNNVPNKYFDMFRNDSEKSKGYYNYINRPSKAPVDEFYKYVKKCIEKVDTPEAKQILNDIELENFLLKQNSRTNGSVPYQMQLDEMIKIIDNQAEYYPILKEKREQLLSILTFRIPYYFGPLNETSEHAWIKRLEGKENQRILPWNYQDIVDVDATAEGFIKRMRSYCTYFPDEEVLPKNSLIVSKYEVYNELNKIRVDDKLLEVDVKNDIYNELFMKNKTVTEKKLKNWLVNNQCCSKDAEIKGFQKENQFSTSLTPWIDFTNIFGKIDQSNFDLIENIIYDLTVFEDKKIMKRRLKKKYALPDDKVKQILKLKYKDWSRLSKKLLDGIVADNRFGSSVTVLDVLEMSRLNLMEIINDKDLGYAQMIEEATSCPEDGKFTYEEVERLAGSPALKRGIWQSLQIVEEITKVMKCRPKYIYIEFERSEEAKERTESKIKKLENVYKDLDEQTKKEYKSVLEELKGFDNTKKISSDSLFLYFTQLGKCMYSGKKLDIDSLDKYQIDHIVPQSLVKDDSFDNRVLVVPSENQRKLDDLVVPFDIRDKMYRFWKLLFDHELISPKKFYSLIKTEYTERDEERFINRQLVETRQITKNVTQIIEDHYSTTKVAAIRANLSHEFRVKNHIYKNRDINDYHHAHDAYIVALIGGFMRDRYPNMHDSKAVYSEYMKMFRKNKNDQKRWKDGFVINSMNYPYEVDGKLIWNPDLINEIKKCFYYKDCYCTTKLDQKSGQLFNLTVLSNDAHADKGVTKAVVPVNKNRSDVHKYGGFSGLQYTIVAIEGQKKKGKKTELVKKISGVPLHLKAASINEKINYIEEKEGLSDVRIIKDNIPVNQMIEMDGGEYLLTSPTEYVNARQLVLNEKQCALIADIYNAIYKQDYDNLDDILMIQLYIELTNKMKVLYPAYRGIAEKFESMNENYVVISKEEKANIIKQMLIVMHRGPQNGNIVYDDFKISDRIGRLKTKNHNLNNIVFISQSPTGIYTKKYKL

SEQ ID NO: 163 - protein, 1419 aa, Chryseobacterium sp.
  Chryseobacterium sp. CF314
MMIKNILGLDLGTNSIGWALIKQNFENKYGEILGMGSRIIPMSQDVLGEFGKGNSVSQTAARTGYRGVRRLRERFLLRRERLHRVLNVLNFLPEHYASQIDFEKRFGKFKYETEPKLAYNNDGFFFKNSFDEMLGDFKDHQFHLLENGRKVPYDWTIYYLRKKALSQKIEKEELAWILLNFNQKRGYYQLRGEDFEEEKDRVFVRLKVDRVVDSGENIKGKILYDVYFENGWKYEKQIVKTEDWIGRTKEFIVTESILKNGDTKRTFKAVDSEKDWIAIKTKTEQEIDKSHKTVGAYIYEALLQNPKQKIKGKLVRTIERKFYREELKKILERQKEFHPELQSDDLYNDCIRELYRNNEAHQITLSKKDFVHLLLNDLIFYQRPLRSQKSSVSNCTLEFRKYKDENGVEHAQYLKTIPKSNPYYQEFRVWQWMFNLNIYRKDDDTNVTKEFLSSTEDYETLFEFLNNRKEVDQKALLRHFKLNEKTHRWNYVEDKKYPCNETKTMISTRLEKVENYPSDFLTREMEQNIWHIIYSVNDKIEYEKALKSFAHKNNLDENSFFEAFKKFPPFKSEYGSFSEKAIKKLLPLLRLGKYWNWESIDRKSQGRIEKIITGEFDGNIKDKVREKAIHLTAENDFQGLQLWLAQYIVYGRHSEASMIGKWNSADDLEEFLKGFKQHSLRNPIVEQVITETLRVVKDIWLKYGNGAKDFFSEIHIELGREMKQTKDERVDATKRITENENTNLRIKALLAEMMNDNSVENIRPYSPMQQEILKIYEDGILKSDIEIDDDILKISKTAQPSSSDLKRYKLWLEQRYKSPYTGQIIPLNKLFTSEYEIEHIIPQSRYFDDSFSNKIICESAVNKLKDNYIGLGFIKQFGGMIVECGFGKSVEIFKAEEYEDFVKKHYANNRSKRNKLLLEEIPEKMIDRQLNDTRHISKYISGVLSNIVRQEDGTDEGVNSKNIVPGNGKITTQLKQDWGLNDVWNELILPRFERMNQLTNSTDFTSWNKNHQKFLPTVPIEFSKGFSKKRIDHRHHAMDALVIACATKDHINLLNNQSAKSDTKRYDLKRKLMKFERVVYSHSKTGEKIEKEVPKQFLKPWDNFTVDAKNKMETIIVSFKQNLRVINKATNHYEKWIEKDGIKRKELIKQEGTNWAIRKPMHKETVSGKVDLPGIKIPKGKILTATRKSLDTSFDLKTINSITDTGIQKILKNYLEFKGSSELAFSPEGIEDMNKNIEKFNDGKPHQSINKVRIFELGSKFSVGQTGNKKDKYVEAAKGTNLFFAVYEDKNGKRSYETIPLNEVIERQKQGLDSVSFKNKEDFLLCPNDLVYVPSEDELENIYNIDFKNLTTEKTGNIYKVVSFSGNQIFFIRQDIAISIVNKAEFSTLNKMERAIDGSMIKENCIKLKIDRLGNIAKI

SEQ ID NO: 164 - protein, 1021 aa, Clostridium cellulolyticum
MKYTLGLDVGIASVGWAVIDKDNNKIIDLGVRCFDKAEESKTGESLATARRIARGMRRRISRRSQRLRLVKKLFVQYEIIKDSSEFNRIFDTSRDGWKDPWELRYNALSRILKPYELVQVLTHITKRRGFKSNRKEDLSTTKEGVVITSIKNNSEMLRTKNYRTIGEMIFMETPENSNKRNKVDEYIHTIAREDLLNEIKYIFSIQRKLGSPFVTEKLEHDFLNIWEFQRPFASGDSILSKVGKCTLLKEELRAPTSCYTSEYFGLLQSINNLVLVEDNNTLTLNNDQRAKIIEYAHFKNEIKYSEIRKLLDIEPEILFKAHNLTHKNPSGNNESKKFYEMKSYHKLKSTLPTDIWGKLHSNKESLDNLFYCLTVYKNDNEIKDYLQANNLDYLIEYIAKLPTFNKFKHLSLVAMKRIIPFMEKGYKYSDACNMAELDFTGSSKLEKCNKLTVEPIIENVTNPVVIRALTQARKVINAIIQKYGLPYMVNIELAREAGMTRQDRDNLKKEHENNRKAREKISDLIRQNGRVASGLDILKWRLWEDQGGRCAYSGKPIPVCDLLNDSLTQIDHIYPYSRSMDDSYMNKVLVLTDENQNKRSYTPYEVWGSTEKWEDFEARIYSMHLPQSKEKRLLNRNFITKDLDSFISRNLNDTRYISRFLKNYIESYLQFSNDSPKSCVVCVNGQCTAQLRSRWGLNKNREESDLHHALDAAVIACADRKIIKEITNYYNERENHNYKVKYPLPWHSFRQDLMETLAGVFISRAPRRKITGPAHDETIRSPKHFNKGLTSVKIPLTTVTLEKLETMVKNTKGGISDKAVYNVLKNRLIEHNNKPLKAFAEKIYKPLKNGTNGAIIRSIRVETPSYTGVFRNEGKGISDNSLMVRVDVFKKKDKYYLVPIYVAHMIKKELPSKAIVPLKPESQWELIDSTHEFLFSLYQNDYLVIKTKKGITEGYYRSCHRGTGSLSLMPHFANNKNVKIDIGVRTAISIEKYNVDILGNKSIVKGEPRRGMEKYNSFKSN

SEQ ID NO: 165 - protein, 1065 aa, Clostridium perfringens
  Clostridium perfringens C str. JGS1495
MNKDINYALGLDIGITSVGWAVINLDLNRIEDLGVRIFNAAENPKDGSSLALPRRLARGRRRLLRRKAYRVERVRKLIVKNNILTKEELEGLFKNKEVIDVWEARVKGLDYKLSREEWAKILINFCKRRGFKSNRKNETKDKEAGQILSSISYNIEKMKETNSRTIGEYIYNEVKNSDDSYAPLRNKFGEYKMCVSRDVLREEIHTLFEKQRELGNNFASDEIEDKYFEIFNSQRPFSNFEDLEKLVGFCTFERKKHKRAPKHCISSEEFTLYEGINKLSIIKDGEKRKLSEEERTLVVNEAFNKKEIKYTTLRKLLGLSEDELFSTLTYSIDKDISKTENTKFVSLKGYHEIKRAIEKGVSKKAWQDIENNRNLLNDIAYVLTLGKTDDEIEKQLRLRNVPEELFESLLDMSFSKFNNLSIYALEKILPFMKEGYQYNEACEKAGYNFKAIYEGVRTKKLPVIEIDEIVNPVVNRALAQTRKVINSVIDKYGSPVRINIELARDLAKNFKDRKLIEKEQKENRANLDKIRENLRELMDKEPTAVEVLKYRLWEQQRGECAYTQSQIALERLFSPGYCEIDHIIPFSRSFDDSLSNKILVLGSENQRKGNKIPYEYFGEDSERWNSFEIWVKGSYLNYKKKANLLKKKFTEEEQRDWKARNLQDTKYICRYISNFVNNRLEFKESENKQKVITVNGRATAYLRSRWGLNKVREDGDKHHALDAAVVGVTTQGMVQKISKYSKAHELYTVRKNDEFVDVETGECVDVDEYKEIRKDILPRPWRGFSEELKLRLSDNPLEELKKLPIETYNEEFIKENVKPIFVSRVPFRKISGKLFKETIYSERAFKDGYFVSKKSLVDLKRGDLDNFYNYECDKKLYDAISERMKEFNYNGKKAFESPFRKPTKSGKEGPVVRSVKIKSAAPFKDGIPMNEGLVAKEGMVRIDIYEKEGKYFVVPVYRYQLAKGIVPKRAAIAGKSELKWPIMDQTYNFKFSIFKNDLIEIKYAKKDGYFGYYDGFDRHTASLVIENHDNSDRYRGIGVKTGVVEFNKYEVDVLGNYHKVNLGGN

SEQ ID NO: 166 - protein, 1065 aa, Clostridium perfringens
  Clostridium perfringens D str. JGS1721
MNKDINYALGLDIGITSVGWAVINLDLNRIEDLGVRIFNAAENLKDGSSLALPRRLARGRRRLLRRKAYRVERVRKLILKNNILTKEELEGLFKNKEVIDVWEARVKGLDYKLSREEWAKILINFCKRRGFKSNRKNEAKDKEAGQILSSISYNIEKMKETNSRTIGEYIYNEVKNSEDSYAPLRNKFGEYKMCVSRDVIREEIHTLFEKQRELGNNFASDEIEDKYFEIFNSQRPFSNFEDLEKLVGFCTFERKKHKRAPKHCISSEEFTLYEGINKLSIIKDGEKRKLSEEERTLVVNEAFNKKEIKYTTLRKLLGLSEEELFSTLTYSIDKDISKTENTKFVSLKGYHEIKRAIEKGVSKKAWQDIENNRNLLNDIAYVLTLGKTDDEIEKQLRLRNVPEELFESLLDMSFNKFNNLSIYALEKILPFMKEGYQYNEACEKAGYNFKAIYEGVRTKKLPVIEIDEIVNPVVNRALAQTRKVINSVIDKYGSPVRINIELARDLAKNFKDRKLIEKEQKENRANLDKIRENLRELMDKEPTVVEVLKYRLWEQQRGECAYTQSQIPLERLFSPGYCEIDHIIPFSRSFDDSLSNKILVLGSENQRKGNRTPYEYFGEDSERWNSFEIWVKGSYLNYKKKANLLKKKFSEEEQRDWKARNLQDTKYICRYISNFVNNRLEFKESENKQKVITVNGRATAYLRSRWGLNKVREDGDKHHALDAAVVGVTTQGMVQKISKYSKAHELYTVRKNDEFVDVETGECVDVDEYKEIRKDILPRPWRGFSEELKLRLSDNPLEELKKSPIETYNEEFIKENVKPIFVSRVPFRKISGKLFKETIYSERAFKDGYFVSKKSLVDLKRGDLDNFYNYECDKKLYDAISERMKEFNYNGKKAFESPFRKPTKSGKEGPVVRSVKIKSAVPFKDGIPMNEGLVAKEGMVRIDIYEKEGKYFVVPVYRYQLAKGIVPKRAAIAKKDELKWPIMDQTYNFKFSIYKNDLIEVKYDKKGVYFGYYDGFDRNSASLTIEKHDNSERYRSIGLKVGVLEINKYEVDVLGNYHKVKLGGN

SEQ ID NO: 167 - protein, 1116 aa, Clostridium spiroforme
  Clostridium spiroforme DSM 1552
MVEFLLKEMKIMGRLVLGLDIGITSVGYGVIDIDKNEFVDYGVRLFKEGTAINNEERRSKRGARRLKRRKTNRIADMKKLLERNGLIDEQYTALNNPYEIRKKGLKNKLSNYELATAILHITKNRGTCLESNADETQDEESTKNILSKNALELKDKYICEIQLARLEESGKIRGINNNFKTEDYLKELSKILENQDLEKETIDKIKEIVARRRRYDQGPGSEKSPTPYGSYRMENGELVHVNLIDMMRGKCSVFPDQLRAPQQSYSAELFNLLNDLNNLKINGEKLSSTEKQKIIDFVNEKGGITVKQLLKLIDVGITEISGFRIDKNEKPLITEFKGYKKVLKVFKNYNQESLLNDKSIVDTIMDINTKIKSIDERSDQLKQVLPSLDTSIINDLASIKGVSGYHSLSLKALNLINNEMLKTEMNQMQVLHQLDIFDKNRVSLKGQRQIYADDNAILSPVAKRAHRETFKVINKLRSIYGEFDSIVIETTRDKNTQDQKKRIKNNQKNYEERNTEVNNFLKEAGYNPENINAKTKMKIRLYIEQDAKSAYTLQDINLKELIEDEKAYEIDHIIPISISLDDSFNNKVLTTHDENQEKGNLTPISAFLKGKFHNGNLNTYKVFIQNNKNLNRKKKEYLLCEDDITRYEVVQNFINRNLVDTSYACRTVMNTLVHYFKDNEINTKVHTIKGQATSTFRKRIGLIKDREEDYFHHAIDALIVASLKKMNLINSYLMKVDFNEMYDEETGEIFNVLPDNSYLDEKYISFVSNLKNIYEESNKYIRGVMIKEKMTYPLIKVSHKIDTKPNRKISDDTIYSTRNVDNQDMLVERIKNIYDPKENAANTLINDIINDNTDKYIMYHKDPQTFDKIKAIVLNHFNEFKTDKNCYIVTKEGLYKLKGTSPLALYYEEFGPITKYAKKNNGPTIHSMKFYSEKLGNHLSITHKYSTVNKKVITKQISPYRTDFYQSPEGKYKFVTVRYKDVAYNAKKDKYIIDHSWYREQKKLKKIADEWIFVCSVHRDELIGIMKADGQKRIFDSSTESDGETLYHDAKTYEILKFTATNNDITGRFEVKPIYCYCKKQLMVSIGTCRKIQKFATDVLGNLYIVKDNVLKLEFK

SEQ ID NO: 168 - protein, 1338 aa, Coprococcus catus
  Coprococcus catus GD/7
MKQEYFLGLDMGTGSLGWAVTDSTYQVMRKHGKALWGTRLFESASTAEERRMFRTARRRLDRRNWRIQVLQEIFSEEISKVDPGFFLRMKESKYYPEDKRDAEGNCPELPYALFVDDNYTDKNYHKDYPTIYHLRKMLMETTEIPDIRLVYLVLHHMMKHRGHFLLSGDISQIKEFKSTFEQLIQNIQDEELEWHISLDDAAIQFVEHVLKDRNLTRSTKKSRLIKQLNAKSACEKAILNLLSGGTVKLSDIFNNKELDESERPKVSFADSGYDDYIGIVEAELAEQYYIIASAKAVYDWSVLVEILGNSVSISEAKIKVYQKHQADLKTLKKIVRQYMTKEDYKRVFVDTEEKLNNYSAYIGMTKKNGKKVDLKSKQCTQADFYDFLKKNVIKVIDHKEITQEIESEIEKENFLPKQVTKDNGVIPYQVHDYELKKILDNLGTRMPFIKENAEKIQQLFEFRIPYYVGPLNRVDDGKDGKFTWSVRKSDARIYPWNFTEVIDVEASAEKFIRRMTNKCTYLVGEDVLPKDSLVYSKFMVLNELNNLRLNGEKISVELKQRIYEELFCKYRKVTRKKLERYLVIEGIAKKGVEITGIDGDFKASLTAYHDFKERLTDVQLSQRAKEAIVLNVVLFGDDKKLLKQRLSKMYPNLTTGQLKGICSLSYQGWGRLSKTFLEEITVPAPGTGEVWNIMTALWQTNDNLMQLLSRNYGFTNEVEEFNTLKKETDLSYKTVDELYVSPAVKRQIWQTLKVVKEIQKVMGNAPKRVFVEMAREKQEGKRSDSRKKQLVELYRACKNEERDWITELNAQSDQQLRSDKLFLYYIQKGRCMYSGETIQLDELWDNTKYDIDHIYPQSKTMDDSLNNRVLVKKNYNAIKSDTYPLSLDIQKKMMSFWKMLQQQGFITKEKYVRLVRSDELSADELAGFIERQIVETRQSTKAVATILKEALPDTEIVYVKAGNVSNFRQTYELLKVREMNDLHHAKDAYLNIVVGNAYFVKFTKNAAWFIRNNPGRSYNLKRMFEFDIERSGEIAWKAGNKGSIVTVKKVMQKNNILVTRKAYEVKGGLFDQQIMKKGKGQVPIKGNDERLADIEKYGGYNKAAGTYFMLVKSLDKKGKEIRTIEFVPLYLKNQIEINHESAIQYLAQERGLNSPEILLSKIKIDTLFKVDGFKMWLSGRTGNQLIFKGANQLILSHQEAAILKGVVKYVNRKNENKDAKLSERDGMTEEKLLQLYDTFLDKLSNTVYSIRLSAQIKTLTEKRAKFIGLSNEDQCIVLNEILHMFQCQSGSANLKLIGGPGSAGILVMNNNITACKQISVINQSPTGIYEKEIDLIKL

SEQ ID NO: 169 - protein, 1384 aa, Coriobacterium glomerans
MKLRGIEDDYSIGLDMGTSSVGWAVTDERGTLAHFKRKPTWGSRLFREAQTAAVARMPRGQRRRYVRRRWRLDLLQKLFEQQMEQADPDFFIRLRQSRLLRDDRAEEHADYRWPLFNDCKFTERDYYQRFPTIYHVRSWLMETDEQADIRLIYLALHNIVKHRGNFLREGQSLSAKSARPDEALNHLRETLRVWSSERGFECSIADNGSILAMLTHPDLSPSDRRKKIAPLFDVKSDDAAADKKLGIALAGAVIGLKTEFKNIFGDFPCEDSSIYLSNDEAVDAVRSACPDDCAELFDRLCEVYSAYVLQGLLSYAPGQTISANMVEKYRRYGEDLALLKKLVKIYAPDQYRMFFSGATYPGTGIYDAAQARGYTKYNLGPKKSEYKPSESMQYDDFRKAVEKLFAKTDARADERYRMMMDRFDKQQFLRRLKTSDNGSIYHQLHLEELKAIVENQGRFYPFLKRDADKLVSLVSFRIPYYVGPLSTRNARTDQHGENRFAWSERKPGMQDEPIFPWNWESIIDRSKSAEKFILRMTGMCTYLQQEPVLPKSSLLYEEFCVLNELNGAHWSIDGDDEHRFDAADREGIIEELFRRKRTVSYGDVAGWMERERNQIGAHVCGGQGEKGFESKLGSYIFFCKDVFKVERLEQSDYPMIERIILWNTLFEDRKILSQRLKEEYGSRLSAEQIKTICKKRFTGWGRLSEKFLTGITVQVDEDSVSIMDVLREGCPVSGKRGRAMVMMEILRDEELGFQKKVDDFNRAFFAENAQALGVNELPGSPAVRRSLNQSIRIVDEIASIAGKAPANIFIEVTRDEDPKKKGRRTKRRYNDLKDALEAFKKEDPELWRELCETAPNDMDERLSLYFMQRGKCLYSGRAIDIHQLSNAGIYEVDHIIPRTYVKDDSLENKALVYREENQRKTDMLLIDPEIRRRMSGYWRMLHEAKLIGDKKFRNLLRSRIDDKALKGFIARQLVETGQMVKLVRSLLEARYPETNIISVKASISHDLRTAAELVKCREANDFHHAHDAFLACRVGLFIQKRHPCVYENPIGLSQVVRNYVRQQADIFKRCRTIPGSSGFIVNSFMTSGFDKETGEIFKDDWDAEAEVEGIRRSLNFRQCFISRMPFEDHGVFWDATIYSPRAKKTAALPLKQGLNPSRYGSFSREQFAYFFIYKARNPRKEQTLFEFAQVPVRLSAQIRQDENALERYARELAKDQGLEFIRIERSKILKNQLIEIDGDRLCITGKEEVRNACELAFAQDEMRVIRMLVSEKPVSRECVISLFNRILLHGDQASRRLSKQLKLALLSEAFSEASDNVQRNVVLGLIAIFNGSTNMVNLSDIGGSKFAGNVRIKYKKELASPKVNVHLIDQSVTGMFERRTKIGL

SEQ ID NO: 170 - protein, 1099 aa, Corynebacterium accolens
  Corynebacterium accolens ATCC 49725
MSLSYRVGIDVGTYSLGCTAIEVDDNDQPVNILSSVSLIHDSGLDPDQQKRAVTRLASSGVARRTRRLYRRRRRRMINLEKFLTSQGWETRPFEHYSDPYLPWNARVALVNGYISDDAQRGMYLSIAFRHIANHRGWRNPYWKVSSLYSPDKPSDAFEQIRKELEESTGHKIPETVTVGQLISFAQFGKDRLRGGGKKKDEKKPQEQVNQAVISARLHQIDHAREINEICRVQKIDDALRKQILDLVFAAESPKGAQIGRVGKDPLQPKLPRALKASDAFQQYRIVALAGNLRIYRDGVSTPLDRDEKLIVFNYLINLSHKEEPSWLKVAEVLNIDRGQLHGTATMTDDGERAGAAPPVHDTNRTILGCKIKPLVHWWEGANDDERAAMLKALSNSEVEDFDSPAGAQTQAFFANLDESEQEKLDSLHLPIGRAAYSEDTLMRLTSRMLDENLDLYEARLAEFDIPKDWAPPAPRIGEPVGNPAVDRVLKGVARWLEAAADEWGAPKSVVIEHVRDGFISKSKANEIDRANNARHKRNRELFKQMQENLGIDGKLRSSDLWRYQSVQRQNCQCAYCGSPITYTTCEMDHIVPRAGEGSTNTRDNLVATCHRCNLAKKNIPFAVWAAQTNIPGVSVKEALDRTRHWSEDSGMTSKDFKKFRKNVCDRLKRTVVDEPLDARSMESVAWMANELRGRVAQRFQEENTVVNVYRGELTAEARRAAGISDKLRFIDGTGKSRLDRRHHAVDAAVVAFTQNYVAETLAIRSNKKREAQLLQAAEQWKEFTGSDAEHRAAWNAWLPKMQKLAVLLQKALDEDRIAVTSNLRLRLGNGRAHEDSIGELKTIRVGDAISVTDIDRASSEALWCALTREPDFDENNGLPENPDRRIRIHGTWYDAEDDIEVFPVGAGAIKVRGGYAELSRFHHARIYKIPGKKAPVYCMLRVYNADLIRHRHEDLFSVEIKPQTMSVRQAEPKLRKALAENTAEYLGWLVTDDELVIDTSNFNTGQIAEMQSELGQVRRWRLDGFYSPSTLRLRPLQMSAEGLREDTSIGAKKIIDRPGWLPAINKLFGEGHVTVVRRDALGRARLTSNAHLPISWKAE

SEQ ID NO: 171 - protein, 1099 aa, Corynebacterium accolens
  Corynebacterium accolens ATCC 49726
MSLLYRVGIDVGTYSLGCTAIEVDDNDQPVSILSSVSLIHDSGLDPDQQKRAVTRLASSGVARRTRRLYRRRRRRMVKLENFLTAQGWETLPFERYSDPYLPWHARVALVNGYISDDTQRGQYLSIAFRHIANHRGWRNPYWKVSSLYSPDKPSDAFEQIRKELEASTGRQIPETATVGQLISFAQFGKDRLRGGGKQKDKKKPQEQVNQAVISARLHQIDHAREINEICRVQKIDDTLRKQILDLVFAAESPKGAQKGRVGKDPLQPKLFRALKASDAFQQYRIAALTGNLRIYRNGVTVPLDRDEKLIVFNYLVNLPKKEEPSWLKIAEILNIDRGQLRGTATMTDDGERAGATPPVHDTNRTILDSKVKPLAHWWENASDDERAAMLKSLSNSEVEDFDSPAGAQVQAFFADLDETEQEKLDSLHLPMGRAAYSEDTLMRLTNRMLDENLDLYEARLAEFGIPKDWAPPAPRIGEPVGNPAVDRVLKGVARWLEAAADEWGAPKSVVIEHVRDGFVSKSKAIEIDRANNNRHKRNRELFQKMQENLGIEGKVRSSDLWRYQSVQRQNCQCAYCGSPITYTTCEMDHIVPRAGEGSTNTRDNLVATCHRCNLAKKNIPFAVWAEKSTIPGVSVKEALDRTRHWSEDSGMSKKDFQKFRKNVCERLNRTVVDEPLDARSMESVAWMANELRGRVAQRFQEENTTVNVYRGALTAEARRAAGITDKLRFIDGTGKSRLDRRHHAVDAAVVAFIHNYVAETLAIRSNKKREAQLLQGTSQWKEFTGSDDKHRAVWNAWIPKMQKLAVLLQIALDEDRIVVTSNLRLRLGNGRAHEDTISELKTIRVGDAISVTDIDRASSEALWCALTREPDFDEKDGLPENPNRRIRVHGTWYDAEDEIEVFPVGAGAIKVRGGYAKLSRFHHARVYKIPGKKAPIYCMLRVYNTDLVQHRHEDLFSVELKPQTMSVRQAEPKLRKALAENTAEYLGWLVTDDELIIDTSTFRTGLIEEMQSEFGLVRRWRLDGFDSPSLLTLRPLHMSAEGLPDDCALGSRKIIDTKGWRVSINKVFNAGNTTVVRRDALGRARLTSNAHLPISWKEE

SEQ ID NO: 172 - protein, 1084 aa, Corynebacterium diphtheriae
MKYHVGIDVGTFSVGLAAIEVDDAGMPIKTLSLVSHIHDSGLDPDKIKSAVTRLASSGIARRTRRLYRRKRRRLQQLDKFIQRQGWPVIELEDYSDPLYPWKVRAELAASYIADEKERGEKLSVALRHIARHRGWRNPYAKVSSLYLPDEPSDAFKAIREEIKRASGQPVPETATVGQMVTLCELGTLKLRGEGGVLSARLQQSDHAREIQEICRMQEIGQELYRKIIDVVFAAESPKGSASSRVGKDPLQPGKNRALKASDAFQRYRIAALIGNLRVRVDGEKRILSVEEKNLVFDHLVNLAPKKEPEWVTIAEILGIDRGQLIGTATMTDDGERAGARPPTHDTNRSIVNSRIAPLVDWWKTASALEQHAMVKALSNAEVDDFDSPEGAKVQAFFADLDDDVHAKLDSLHLPVGRAAYSEDTLVRLTRRMLADGVDLYTARLQEFGIEPSWTPPAPRIGEPVGNPAVDRVLKTVSRWLKSATKTWGAPERVIIEHVREGFVTEKRAREMDGDMRRRAARNAKLFQEMQEKLNVQGKPSRADLWRYQSVQRQNCQCAYCGSPITFSNSEMDHIVPRAGQGSTNTRENLVAVCHRCNQSKGNTPFAIWAKNTSIEGVSVKEAVERTRHWVTDTGMRSTDFKKFTKAVVERFQRATMDEEIDARSMESVAWMANELRSRVAQHFASHGTTVRVYRGSLTAEARRASGISGKLEFLDGVGKSRLDRRHHAIDAAVIAFTSDYVAETLAVRSNLKQSQAHRQEAPQWREFTGKDAEHRAAWRVWCQKMEKLSALLTEDLRDDRVVVMSNVRLRLGNGSAHEETIGKLSKVKLGSQLSVSDIDKASSEALWCALTREPDFDPKDGLPANPERHIRVNGTHVYAGDNIGLFPVSAGSIALRGGYAELGSSFHHARVYKITSGKKPAFAMLRVYTIDLLPYRNQDLFSVELKPQTMSMRQAEKKLRDALATGNAEYLGWLVVDDELVVDTSKIATDQVKAVEAELGTIRRWRVDGFFGDTRLRLRPLQMSKEGIKKESAPELSKIIDRPGWLPAVNKLFSEGNVTVVRRDSLGRVRLESTAHLPVTWKVQ

SEQ ID NO: 173 - protein, 1084 aa, Corynebacterium diphtheriae
MKYHVGIDVGTFSVGLAAIEVDDAGMPIKTLSLVSHIHDSGLDPDKMKSAVTRLASSGIARRTRRLYRRKRRRLQQLDKFIQRQGWPVIELEDYSDPLYPWKVRAELAASYIADEKERGEKLSVALRHIARHRGWRNPYAKVSSLYLPDEPSDAFKSIREEIKRASGQPVPETATVGQMVTLCELGTLKLRGEGGVLSARLQQSDHAREIQEICRMQEIGQELYRKIIDVVFAAESPKGSASSRVGKDPLQPGKNRALKASDAFQRYRIAALIGNLRVRVDGEKRILSVEEKNLVFDHLVNLAPKKEPEWVTIAEILGIDRGQLIGTATMTDDGERAGARPPTHDTNRSIVNSRIAPLVDWWKTASALEQHAMVKALSNAEVDDFDSPEGAKVQAFFADLDDDVHAKLDSLHLPVGRAAYSEDTLVRLTRRMLADGVDLYTARLQEFGIEPSWTPPAPRIGEPVGNPAVDRVLKTVSRWLESATKTWGAPERVIIEHVREGFVTEKRAREMDGDMRRRAARNAKLFQEMQEKLNVQGKPSRADLWRYQSVQRQNCQCAYCGSPITFSNSEMDHIVPRAGQGSTNTRENLVAVCHRCNQSKGNTPFAIWAKNTSIEGVSVKEAVERTRHWVTDTGMRSTDFKKFTKAVVERFQRATMDEEIDARSMESVAWMANELRSRVAQHFASHGTTVRVYRGSLTAEARRASGISGKLEFLDGVGKSRLDRRHHAIDAAVIAFTSDYVAETLAVRSNLKQSQAHRQEAPQWREFTGKDAEHRAAWRVWCQKMEKLSALLTEDLRDDRVVVMSNVRLRLGNGSAHEETIGKLSKVKLGSQLSVSDIDKASSEALWCALTREPDFDPKDGLPANPERHIRVNGTHVYAGDNIGLFPVSAGSIALRGGYAELGSSFHHARVYKITSGKKPAFAMLRVYTIDLLPYRNQDLFSVELKPQTMSMRQAEKKLRDALATGNAEYLGWLVVDDELVVDTSKIATDQVKAVEAELGTIRRWRVDGFFGDTRLRLRPLQMSKEGIKKESAPELSKIIDRPGWLPAVNKLFSEGNVTVVRRDSLGRVRLESTAHLPVTWKVQ

SEQ ID NO: 174 - protein, 1084 aa, Corynebacterium diphtheriae
MKYHVGIDVGTFSVGLAAIEVDDAGMPIKTLSLVSHIHDSRLDPDKIKSAVTRLASSGIARRTRRLYRRKRRRLQQLDKFIQRQGWPVIELEDYSDPLYPWKVRAELAASYIADEKERGEKLSVALRHIARHRGWRNPYAKVSSLYLPDEPSDAFKAIREEIKRASGQPVPETATVGQMVTLCELGTLKLRGEGGVLSARLQQSDHAREIQEICRMQEIGQELYRKIIDVVFAAESPKGSASSRVGKDPLQPGKNRALKASDAFQRYRIAALIGNLRVRVDGEKRILSVEEKNLVFDHLVNLAPKKEPEWVTIAEILGIDRGQLIGTATMTDDGERAGARPPTHDTNRSIVNSRIAPLVDWWKTASALEQHAMVKALSNAEVDDFDSPEGAKVQAFFADLDDDVHAKLDSLHLPVGRAAYSEDTLVRLTRRMLADGVDLYTARLQEFGIEPSWTPPAPRIGEPVGNPAVDRVLKTVSRWLESATKTWGAPERVIIEHVREGFVTEKRAREMDGDMRRRAARNAKLFQEMQEKLNIQGKPSRADLWRYQSVQRQNCQCAYCGSPITFSNSEMDHIVPRAGQGSTNTRENLVAVCHRCNQSKGNTPFAIWAKNTSIEGVSVKEAVERTRHWVTDTGMRSTDFKKFTKAVVERFQRVTMDEEIDARSMESVAWMANELRSRVAQHFASRGTTVRVYRGSLTAEARRASGISGKLEFLDGVGKSRLDRRHHAIDAAVIAFTSDYVAETLAVRSNLKQSQAHRQEAPQWREFTGKDAEHRAAWRVWCQKMEKLSALLTEDLRDDRVVVMSNVRLRLGNGSAHEETIGKLSKVKLGSQLSVSDIDKASSEALWCALTREPDFDPKDGLPANPERHIRVNGTHVYAGDNIGLFPVSAGSIALRGGYAELGSSFHHARVYKITSGKKPAFAMLRVYTIDLLPYRNQDLFSVELKPQTMSMRQAEKKLRDALATGNAEYLGWLVVDDELVVDTSKIATDQVKAVEAELGTIRRWRVDGFFGDTRLRLRPLQMSKEGIKKESAPELSKIIDRPGWLPAVNKLFSEGNVTVVRRDSLGRVRLESTAHLPVTWKVQ

SEQ ID NO: 175 - protein, 1084 aa, Corynebacterium diphtheriae
  Corynebacterium diphtheriae bv. intermedius str. NCTC 5011
MKYHVGIDVGTFSVGLAAIEVDDAGMPIKTLSLVSHIHDSGLDPDEIKSAVTRLASSGIARRTRRLYRRKRRRLQQLDKFIQRQGWPVIELEDYSDPLYPWKVRAELAASYIADEKERGEKLSVALRHIARHRGWRNPYAKVSSLYLPDGPSDAFKAIREEIKRASGQPVPETATVGQMVTLCELGTLKLRGEGGVLSARLQQSDHAREIQEICRMQEIGQELYRKIIDVVFAAESPKGSASSRVGKDPLQPGKNRALKASDAFQRYRIAALIGNLRVRVDGEKRILSVEEKNLVFDHLVNLAPKKEPEWVTIAEILGIDRGQLIGTATMTDDGERAGARPPTHDTNRSIVNSRIAPLVDWWKTASALEQHAMVKALSNAEVDDFDSPEGAKVQAFFADLDDDVHAKLDSLHLPVGRAAYSEDTLVRLTRRMLADGVDLYTARLQEFGIEPSWTPPAPRIGEPVGNPAVDRVLKTVSRWLESATKTWGAPERVIIEHVREGFVTEKRAREMDGDMQRRAARNAKLFQEMQEKLNVQGKPSRADLWRYQSVQRQNCQCAYCGSPITFSNSEMDHIVPRAGQGSTNTRENLVAVCHRCNQSKGNTPFAIWAKNTSIEGVSVKEAVERTRHWVTDTGMRSPDFKKFTKAVVERFQRATMDEEIDARSMESVAWMANELRSRVAQHFASHGTTVRVYRGSLTAEARRASGISGKLKFFDGVGKSRLDRRHHAIDAAVIAFTSDYVAETLAVRSNLKQSQAHRQEAPQWREFTGKDAEHRAAWRVWCQKMEKLSALLTEDLRDDRVVVMSNVRLRLGNGSAHKETIGKLSKVKLGSQLSVSDIDKASSEALWCALTREPDFDPKEGLPANPERHIRVNGTHVYAGDNIGLFPVSAGSIALRGGYAELGSSFHHARVYKITSGKKPAFAMLRVYTIDLLPYRNQDLFSVELKPQTMSMRQAEKKLRDALATGNAEYLGWLVVDDELVVDTSKIATDQVKAVEAELGTIRRWRVDGFFSPSKLRLRPLQMSKEGIKKESAPELSKIIDRPGWLPAVNKLFSDGNVTVVRRDSLGRVRLESTAHLPVTWKVQ

SEQ ID NO: 176 - protein, 1084 aa, Corynebacterium diphtheriae
MKYHVGIDVGTFSVGLAAIEVDDAGMPIKTLSLVSHIHDSGLDPDKIKSAVTRLASSGIARRTRRLYRRKRRRLQQLDKFIQRQGWPVIELEDYSDPLYPWKVRAELAASYIADEKERGEKLSVALRHIARHRGWRNPYAKVSSLYLPDEPSDAFKAIREEIKRASGQPVPETATVGQMVTLCELGTLKLRGEGGVLSARLQQSDHAREIQEICRMQEIGQELYRKIIDVVFAAESPKGSASSRVGKDPLQPGKNRALKASDAFQRYRIAALIGNLRVRVDGEKRILSVEEKNLVFDHLVNLAPKKEPEWVTIAEILGIDRGQLIGTATMTDDGERAGARPPTHDTNRSIVNSRIAPLVDWWKTASALEQHAMVKALSNAEVDDFDSPEGAKVQAFFADLDDDVHAKLDSLHLPVGRAAYSEDTLVRLTRRMLADGVDLYTARLQEFGIEPSWTPPAPRIGEPVGNPAVDRVLKTVSRWLESATKTWGAPERVIIEHVREGFVTEKRAREMDGDMRRRAARNAKLFQEMQEKLNVQGKPSRADLWRYQSVQRQNCQCAYCGSPITFSNSEMDHIVPRAGQGSTNTRENLVAVCHRCNQSKGNTPFAIWAKNTSIEGVSVKEAVERTRHWVTDTGMRSTDFKKFTKAVVERFQRATMDEEIDARSMESVAWMANELRSRVAQHFASHGTTVRVYRGSLTAEARRASGISGKLEFLDGVGKSRLDRRHHAIDAAVIAFTSDYVAETLAVRSNLKQSQAHRQEAPQWREFTGKDAEHRAAWRVWCQKMEKLSALLTEDLRDDRVVVMSNVRLRLGNGSAHEETIGKLSKVKLGSQLSVSDIDKASSEALWCALTREPDFDPKDGLPANPERHIRVNGTHVYAGDNIGLFPVSAGSIALRGGYAELGSSFHHARVYKITSGKKPAFAMLRVYTIDLLPYRNQDLFSVELKPQTMSMRQAEKKLRDALATGNAEYLGWLVVDDELVVDTSKIATDQVKAVEAELGTIRRWRVDGFFGDTRLRLRPLQMSKEGIKKESAPELSKIIDRPGWLPAVNKLFSEGNVTVVRRDSLGRVRLESTAHLPVTWKVQ

SEQ ID NO: 177 - protein, 1084 aa, Corynebacterium diphtheriae
MKYHVGIDVGTFSVGLAAIEVDDAGMPIKTLSLVSHIHDSGLDPDEIKSAVTRLASSGIARRTRRLYRRKRRRLQQLDKFIQRQGWPVIELEDYSDPLYPWKVRAELAASYIADEKERGEKLSVALRHIARHRGWRNPYAKVSSLYLPDGPSDAFKAIREEIKRASGQPVPETATVGQMVTLCELGTLKLRGEGGVLSARLQQSDHAREIQEICRMQEIGQELYRKIIDVVFAAESPKGSASSRVGKDPLQPGKNRALKASDAFQRYRIAALIGNLRVWVDGEKRILSVEEKNLVFDHLVNLTPKKEPEWVTIAEILGIDRGQLIGTATMTDDGERAGARPPTHDTNRSIVNSRIAPLVDWWKTASALEQHAMVKALSNAEVDDFDSPERAKVQAFFADLDDDVHAKLDSLHLPVGRAAYSEDTLVRLTRRMLSDGVDLYTARLQEFGIEPSWTPPTPRIGEPVGNPAVDRVLKTVSRWLESATKTWGAPERVIIEHVREGFVTEKRAREMDGDMRRRAARNAKLFQEMQEKLNVQGKPSRADLWRYQSVQRQNCQCAYCGSPITFSNSEMDHIVPRAGQGSTNTRENLVAVCHRCNQSKGNTPFAIWAKNTSIEGVSVKEAVERTRHWVTDTGMRSTDFKKFTKAVVERFQRATMDEEIDARSMESVAWMANELRSRVAQHFASHGTTVRVYRGSLTAEARRASGISGKLEFLDGVGKSRLDRRHHAIDAAVIAFTSDYVAETLAVRSNLKQSQAHRQEAPQWREFTGKDAEHRATWRVWCQKMEKLSALLTEDLRDDRVVVMSNVRLRLGNGSAHEETIGKLSKVKLGSQLSVSDIDKASSEALWCALTREPDFDPKDGLPANPERHIRVNGTHVYAGDNIGLFPVSAGSIALRGGYAELGSSFHHARVYKITSGKKPAFAMLRVYTIDLLPYRNQDLFSVELKPQTMSMRQAEKKLRDALATGNAEYLGWLVVDDELVVDTSKIATDQVKAVEAELGTIRRWRVDGFFGDTRLRLRPLQMSKEGIKKESAPELSKIIDRPGWLPAVNKLFSEGNVTVVRRDSLGRVRLESTAHLPVTWKVQ

SEQ ID NO: 178 - protein, 1084 aa, Corynebacterium diphtheriae
MKYHVGIDVGTFSVGLAAIEVDDAGMPIKTLSLVSHIHDSGLDPDEIKSAVTRLASSGIARRTRRLYRRKRRRLQQLDKFIQRQGWPVIELEDYSDPLYPWKVRAELAASYIADEKERGEKLSVALRHIARHRGWRNPYAKVSSLYLPDGPSDAFKAIREEIKRASGQPVPETATVGQMVTLCELGTLKLRGEGGVLSARLQQSDYAREIQEICRMQEIGQELYRKIIDVVFAAESPKGSASSRVGKDPLQPGKNRALKASDAFQRYRIAALIGNLRVRVDGEKRILSVEEKNLVFDHLVNLTPKKEPEWVTIAEILGIDRGQLIGTATMTDDGERAGARPPTHDTNRSIVNSRIAPLVDWWKTASALEQHAMVKALSNAEVDDFDSPEGAKVQAFFADLDDDVHAKLDSLHLPVGRAAYSEDTLVRLTRRMLSDGVDLYTARLQEFGIEPSWTPPTPRIGEPVGNPAVDRVLKTVSRWLESATKTWGAPERVIIEHVREGFVTEKRAREMDGDMRRRAARNAKLFQEMQEKLNVQGKPSRADLWRYQSVQRQNCQCAYCGSPITFSNSEMDHIVPRAGQGSTNTRENLVAVCHRCNQSKGNTPFAIWAKNTSIEGVSVKEAVERTRHWVTDTGMRSTDFKKFTKAVVERFQRATMDEEIDARSMESVAWMANELRSRVAQHFASHGTTVRVYRGSLTAEARRASGISGKLKFFDGVGKSRLDRRHHAIDAAVIAFTSDYVAETLAVRSNLKQSQAHRQEAPQWREFTGKDAEHRAAWRVWCQKMEKLSALLTEDLRDDRVVVMSNVRLRLGNGSAHKETIGKLSKVKLSSQLSVSDIDKASSEALWCALTREPGFDPKEGLPANPERHIRVNGTHVYAGDNIGLFPVSAGSIALRGGYAELGSSFHHARVYKITSGKKPAFAMLRVYTIDLLPYRNQDLFSVELKPQTMSMRQAEKKLRDALATGNAEYLGWLVVDDELVVDTSKIATDQVKAVEAELGTIRRWRVDGFFSPSKLRLRPLQMSKEGIKKESAPELSKIIDRPGWLPAVNKLFSDGNVTVVRRDSLGRVRLESTAHLPVTWKVQ

SEQ ID NO: 179 - protein, 1084 aa, Corynebacterium diphtheriae
MKYHVGIDVGTFSVGLAAIEVDDAGMPIKTLSLVSHIHDSGLDPDKMKSAVTRLASSGIARRTRRLYRRKRRRLQQLDKFIQRQGWPVIELEDYSDPLYPWKVRAELAASYIADEKERGEKLSVALRHIARHRGWRNPYAKVSSLYLPDEPSDAFKSIREEIKRASGQPVPETATVGQMVTLCELGTLKLRGEGGVLSARLQQSDHAREIQEICRMQEIGQELYRKIIDVVFAAESPKGSASSRVGKDPLQPGKNRALKASDSFQRYRIAALISNLRVRVDGEKRILSVEEKNLVFDHLVNLAPKKEPEWVTIAEILGIDRGQLIGTATMTDDGERAGARPPTHDTNRSIVNSRIAPLVDWWKTASALEQHAMVKALSNAEVDDFDSPEGAKVQAFFADLDDDVHAKLDSLHLPVGRAAYSEDTLVRLTRRMLADGVDLYTARLQEFGIEPSWTPPAPRIGEPVGNPAVDRVLKTVSRWLESATKTWGAPERVIIEHVRDGFVTEKRAREMDGDMRRRAARNAKLFQEMQEKLNVQGKPSRADLWRYQSVQRQNCQCAYCGSPITFSNSEMDHIVPRAGQGSTNTRENLVAVCHRCNQSKGNTPFAIWAKNTSIEGVSVKEAVERTRHWVTDTGMRSTDFKKFTKAVVERFQRATMDEEIDARSMESVAWMANELRSRVAQHFASHGTTVRVYRGSLTAEARRASGISGKLEFLDGVGKSRLDRRHHAIDAAVIAFTSDYVAETLAVRSNLKQSQAHRQEAPQWREFTGKDAEHRAAWRVWCQKMEKLSALLTEDLRDDRVVVMSNVRLRLGNGSAHEETIGKLSKVKLGSQLSVSDIDKASSEALWCALTREPDFDPKDGLPANPERHIRVNGTHVYAGDNIGLFPVSAGSIALRGGYAELGSSFHHARVYKITSGKKPAFAMLRVYTIDLLPYRNQDLFSVELKPQTMSMRQAEKKLRDALATGNAEYLGWLVVDDELVVDTSKIATDQVKAVEAELGTIRRWRVDGFFGDTRLRLRPLQMSKEGIKKELAPELSKIIDRPGWLPAVNKLFSEGNVTVVRRDSLGRVRLESTAHLPVTWKVQ

SEQ ID NO: 180 - protein, 1089 aa, Corynebacterium matruchotii
  Corynebacterium matruchotii ATCC 14266
MNSANVNYRVGIDVGSYSLGMAAIAIDDDGKPTEILSAISLIHDSGVDPDSAKSAATRLATSGIARRTRRLYRRKRKRLAKLDKFISSQGWPLKEFEKYEDPFYPWRVRAELATTAITDQQELGEKLSIALRHIARHRGWRNPYSKVTALYTVTEPSDAFLAMQEECAKQLGRTIPETITVGQLVTGMNLGKTRLRGENSLLAARPRQSDNANEIHTIAKVQGLSNELVRQIIDHVFAAESPKGSAAEQVGKDPLQPTKKRALKASDAFQQYRIAALIGNLRIRGGKGNRRLTTEETRLVFDYLRSLPAKQEPTWQLVAEQLKIDRGNLVGTAIMTDDGERAGAKPPVHDTNRIMENTKIKPLATWWKSADADARAAMVKALSNAEVDDFDSQAGAQVQEFFFGISDEDQEKLDGLHLPIGRAAYSEDTLDRLTKRMIGEGMDLYEARQAEFKISNDWAPPAPEIGERVGNPAVDRVLKATARWLNAAERQWGAPKSVNIEHVRAAFMSESSARELDRDNQQRAKRNVKVVAEMQEKLGIEGRPSRADVWRFQSIQRQNGKCAYCGAEISFKNSEMDHIIPQAGEGSTNTRDNLVAVCRECNSSKSNIAFAVWAENTSRPGVSVQKAIERTHHWVTDSGLRKPEFDKFRKQVCDRLRRKATDEPIDARSLESVAWMANELRSRIAQKFKDGDTKVRVYKGALTAEARRASGISGKLEFVDGKGKSRLDRRHHAVDAAVVAFTSNYVAETLALRSNMKFDQELRRKAPQWREFTGSDHVHQVEWTKWKYRMQALAELLNNALVQDRIVVMHNLRLRLGNGAAHEDTIGKLTRLKVGDAISTTDIDRASSEALWCALTRDPDYDPKTGLPENPNRTIRIHGTHLTASDEITVFPVAAASIPIRDGFAKLGSNYHHVRLFRVPSGKKYKYCLMQVYTVDLLKFRKEDLFTVELKPQTISVRTCEALLRKALANGTAEYLGWLVSDDELLIDTSSFDTPGIVKLREEYGPVNRWRLAGLTSVTRLNLRPLYLSKEGLKPNVNPEIKKIIDNRSWIITVNKLFSSGHVKIIRRDALGRPRLHSAAHLPICWEVK

SEQ ID NO: 181 - protein, 1069 aa, Corynebacterium matruchotii
  Corynebacterium matruchotii ATCC 33806
MAAIAIDDDGKPTEILSAISLIHDSGVDPDSAKSAATRLATSGIARRTRRLYRRKRKRLAKLDKFISSQGWPLKEFEKYEDPFYPWRVRAELATTAITDQQELGEKLSIALRHIARHRGWRNPYSKVTALYTVTEPSDAFLAMQEECAKQLGRTIPETITVGQLVTGMNLGKTRLRGENSLLAARPRQSDNANEIHTIAKVQGLSNELVRQIIDHVFAAESPKGSAAEQVGKDPLQPTKKRALKASDAFQQYRIAALIGNLRIRGGKGNRRLTTEETRLVFDYLRSLPAKQEPTWQLVAEQLKIDRGNLVGTAIMTDDGERAGAKPPVHDTNRIMENTKIKPLATWWKSADADARAAMVKALSNAEVDDFDSQAGAQVQEFFFGISDEDQEKLDGLHLPIGRAAYSEDTLDRLTKRMIGEGMDLYEARQAEFKISNDWAPPAPEIGERVGNPAVDRVLKATARWLNAAERQWGAPKSVNIEHVRAAFMSESSARELDRDNQQRAKRNVKVVAEMQEKLGIEGRPSRADVWRFQSIQRQNGKCAYCGAEISFKNSEMDHIIPQVGEGSTNTRDNLVAVCRECNSSKSNIAFAVWAENTSRPGVSVQKAIERTHHWVTDSGLRKPEFDKFRKQVCDRLRRKATDEPIDARSLESVAWMANELRSRIAQKFKDGDTKVRVYKGALTAEARRASGISGKLEFVDGKGKSRLDRRHHAVDAAVVAFTSNYVAETLALRSNMKFDQELRRKAPQWREFTGSDHVHQVEWTKWKYRMQALAELLNNALVQDRIVVMHNLRLRLGNGAAHEDTIGKLTRLKVGDAISTTDIDRASSEALWCALTRDPDYDPKTGLPENPNRTIRIHGTHLTASDEITVFPVAAASIPIRDGFAKLGSNYHHVRLFRVPSGKKYKYCLMQVYTVDLLKFRKEDLFTVELKPQTISVRTCEALLRKALANGTAEYLGWLVSDDELLIDTSSFDTPGIVKLREEYGPVNRWRLAGLTSVTRLNLRPLYLSKEGLKPNVNPEIKKIIDNRSWIITVNKLFSSGHVKIIRRDALGRPRLHSAAHLPICWEVK

SEQ ID NO: 182 - protein, 1079 aa, Dinoroseobacter shibae
MRLGLDIGTSSIGWWLYETDGAGSDARITGVVDGGVRIFSDGRDPKSGASLAVDRRAARAMRRRRDRYLRRRATLMKVLAETGLMPADPAEAKALEALDPFALRAAGLDEPLPLPHLGRALFHLNQRRGFKSNRKTDRGDNESGKIKDATARLDMEMMANGARTYGEFLHKRRQKATDPRHVPSVRTRLSIANRGGPDGKEEAGYDFYPDRRHLEEEFHKLWAAQGAHHPELTETLRDLLFEKIFFQRPLKEPEVGLCLFSGHHGVPPKDPRLPKAHPLTQRRVLYETVNQLRVTADGREARPLTREERDQVIHALDNKKPTKSLSSMVLKLPALAKVLKLRDGERFTLETGVRDAIACDPLRASPAHPDRFGPRWSILDADAQWEVISRIRRVQSDAEHAALVDWLTEAHGLDRAHAEATAHAPLPDGYGRLGLTATTRILYQLTADVVTYADAVKACGWHHSDGRTGECFDRLPYYGEVLERHVIPGSYHPDDDDITRFGRITNPTVHIGLNQLRRLVNRIIETHGKPHQIVVELARDLKKSEEQKRADIKRIRDTTEAAKKRSEKLEELEIEDNGRNRMLLRLWEDLNPDDAMRRFCPYTGTRISAAMIFDGSCDVDHILPYSRTLDDSFPNRTLCLREANRQKRNQTPWQAWGDTPHWHAIAANLKNLPENKRWRFAPDAMTRFEGENGFLDRALKDTQYLARISRSYLDTLFTKGGHVWVVPGRFTEMLRRHWGLNSLLSDAGRGAVKAKNRTDHRHHAIDAAVIAATDPGLLNRISRAAGQGEAAGQSAELIARDTPPPWEGFRDDLRVRLDRIIVSHRADHGRIDHAARKQGRDSTAGQLHQETAYSIVDDIHVASRTDLLSLKPAQLLDEPGRSGQVRDPQLRKALRVATGGKTGKDFENALRYFASKPGPYQAIRRVRIIKPLQAQARVPVPAQDPIKAYQGGSNHLFEIWRLPDGEIEAQVITSFEAHTLEGEKRPHPAAKRLLRVHKGDMVALERDGRRVVGHVQKMDIANGLFIVPHNEANADTRNNDKSDPFKWIQIGARPAIASGIRRVSVDEIGRLRDGGTRPI

SEQ ID NO: 183 - protein, 1332 aa, Dolosigranulum pigrum
  Dolosigranulum pigrum ATCC 51524
MQKNYTIGLDIGTNSVGWAVMKDDYTLIRKRMKVLGNTDIKKIKKNFWGVRLFDEGETAKETRLKRGTRRRYQRRRNRLIYLQDIFQQPMLAIDENFFHRLDDSFFVPDDKSYDRHPIFGSLEEEVAYHNTYPTIYHLRKHLADNPEKADLRLVYTALAHIVKYRGHFLIEGELNTENTSISETFEQFLDTYSDIFKEQLVGDISKVEEILSSKQSRSRKHEQIMALFPNENKLGNFGRFMMLIVGNTSNFKPVFDLDDEYKLKLSDETYEEDLDTLLGMTDDVFLDVFMAAKNVYDAVEMSAIISTDTGNSKAVLSNQMINFYDEHKVDLAQLKQFFKTHLPDKYYECFSDPSKNGYAGYIDGKTNQEDFYKYIEKVMKTIKSDKKDYFLDKIDREVFLRKQRSFYNSVIPHQIHLQEMQAILDRQSQYYPFLAENRDKIESLVTFRIPYYVGPLTVSDQSEFAWMERQSDEPIRPWNFDEIVNKERSAEKFIERMTNMDTYLLEEKVLPKRSLLYQTFEVYNELTKVRYTNEQGKTEKLNRQQKAEIIETLFKQKNRVREKDIANYLEQYGYVDGTDIKGVEDKFNASLSTYNDLAKIDGAKAYLDDPEYADVWEDIIKILTIFEDKAMRKKQLQTYSDTLSPEILKKLERKHYTGWGRFSKKLINGLRDEGSNKTILDYLKSDEGSSGPTNRNFMQLIRDNTLSFKKKIEDAQTIEDTTHIYDTVAELPGSPAIKKGIRQALKIVEEIIDIIGYEPENIVVEMARESQTTKKGKDLSKERLEKLTEAIKEFDGPSDVKVKDLKNENLRNDRLYLYYLQNGRDMYTNEPLDINNLSKYDIDHIIPQSFTTDNSIDNKVLVSRTKNQGNKSDDVPSINIVHKMKPFWRQLHKAGLISDRKFKNLTKAEHGGLTEADRAHFLNRQLVETRQITKHVANLLDSQYNTAEEQRINIVLLKSSMTSRFRKEFKLYKVREINDYHHGHDAYLNAVVATTIMKVYPNLKPQFVYGQYKKTSMFKEEKATARKHFYSNITKFFKKEKVVNEETGEILWDTERHLSTIKRVLSWKQMNIVKKVEKQKGQLWKETIYPKGDSSKLIPVKEGMDPQKYGGLSQVSEAFAVVITHEKGKKKQLKSDLISIPIVDQKAYEQHPTAYLEEAGYNNPTVLHELFKYQLFELEDGSRRMIASAKEFQKGNQMVLPLELVELLYHANRYDKVKFPDSIEYVHDNLAKFDDLLEYVIDFSNKYINADKNVQKIQKIYKEHGTEDVELTVESFVNLMTFTAMGAPATFKFYGESITRSRYTSITEFRGSTLIFQSITGLYETRYKLEDN

SEQ ID NO: 184 - protein, 1340 aa, Dorea longicatena
  Dorea longicatena DSM 13814
MEQEYYLGLDMGTGSVGWAVTDSEYHVLRKHGKALWGVRLFESASTAEERRMFRTSRRRLDRRNWRIEILQEIFAEEISKKDPGFFLRMKESKYYPEDKRDINGNCPELPYALFVDDDFTDKDYHKKFPTIYHLRKMLMNTEETPDIRLVYLAIHHMMKHRGHFLLSGDINEIKEFGTTFSKLLENIKNEELDWNLELGKEEYAVVESILKDNMLNRSTKKTRLIKALKAKSICEKAVLNLLAGGTVKLSDIFGLEELNETERPKISFADNGYDDYIGEVENELGEQFYIIETAKAVYDWAVLVEILGKYTSISEAKVATYEKHKSDLQFLKKIVRKYLTKEEYKDIFVSTSDKLKNYSAYIGMTKINGKKVDLQSKRCSKEEFYDFIKKNVLKKLEGQPEYEYLKEELERETFLPKQVNRDNGVIPYQIHLYELKKILGNLRDKIDLIKENEDKLVQLFEFRIPYYVGPLNKIDDGKEGKFTWAVRKSNEKIYPWNFENVVDIEASAEKFIRRMTNKCTYLMGEDVLPKDSLLYSKYMVLNELNNVKLDGEKLSVELKQRLYTDVFCKYRKVTVKKIKNYLKCEGIISGNVEITGIDGDFKASLTAYHDFKEILTGTELAKKDKENIITNIVLFGDDKKLLKKRLNRLYPQITPNQLKKICALSYTGWGRFSKKFLEEITAPDPETGEVWNIITALWESNNNLMQLLSNEYRFMEEVETYNMGKQTKTLSYETVENMYVSPSVKRQIWQTLKIVKELEKVMKESPKRVFIEMAREKQESKRTESRKKQLIDLYKACKNEEKDWVKELGDQEEQKLRSDKLYLYYTQKGRCMYSGEVIELKDLWDNTKYDIDHIYPQSKTMDDSLNNRVLVKKKYNATKSDKYPLNENIRHERKGFWKSLLDGGFISKEKYERLIRNTELSPEELAGFIERQIVETRQSTKAVAEILKQVFPESEIVYVKAGTVSRFRKDFELLKVREVNDLHHAKDAYLNIVVGNSYYVKFTKNASWFIKENPGRTYNLKKMFTSGWNIERNGEVAWEVGKKGTIVTVKQIMNKNNILVTRQVHEAKGGLFDQQIMKKGKGQIAIKETDERLASIEKYGGYNKAAGAYFMLVESKDKKGKTIRTIEFIPLYLKNKIESDESIALNFLEKGRGLKEPKILLKKIKIDTLFDVDGFKMWLSGRTGDRLLFKCANQLILDEKIIVTMKKIVKFIQRRQENRELKLSDKDGIDNEVLMEIYNTFVDKLENTVYRIRLSEQAKTLIDKQKEFERLSLEDKSSTLFEILHIFQCQSSAANLKMIGGPGKAGILVMNNNISKCNKISIINQSPTGIFENEIDLLKI

SEQ ID NO: 185 - protein, 1380 aa, Eggerthella sp.
  Eggerthella sp. YY7918
MNLRHVGNYNIGLDMGTASVGWAAIDEQGELLHFKGKPTWGSRLFDSANTAATARMPRGQRRRYIRRRWRLDLLQKFFSEEMAEKDPEFFIRLRQSSLWPEDREGGHTAYHWPLFNDSDFNEKEYYEKFPTIFHLRQWLMETDEKADIRLIYLAFHNIVKHRGNFLQENNDSLSAQNANMRESLESFCIALEEWCDEKELTCSCDPQKLEHLFKEVKYRSDIRDGFAALLGLACSGENEVDVKAMAKEMGKAIVGYKADFSKIFTECDKEGSSFRLSDDEGPEAFLDICPDDGIALFEAIQMVYSSFILTGMLTEKGLSLSKISAYNQYGQDLESLKALVKEYVPNEYSSFFRGPTYSGSTEYDPSKAQGYTRYNLGPSKKGSGAKPMAYEDFKKSVEQLFANTNAINDERYKEMMGRFAEEKFLRRLRTSDNGRIPFQLNLEEMTAIIINQGKYYPFLLEQQEKLESLVRFRIPYYVGPLTRINARLDSKGNACFAWSKRKDGMDSASIKPWNWDEVIDKHASAQAFIERMTGTCTYLRGEPVLPRCSLLYEEYCVLNELNGARWTQDGDKFIRFDYKDRSDIIEELFKKRRGRIQYAAVADWMKQERSHANVHVSGGQGENAFESRLSSYHFFCNDVFGVDELPGSYVDMVEEIILWSTLFEDRSILREEIQRKYGDVLNEEQIKTICKKRFSGWGRLSRKLLCSLKAQTDNGPKSIMDILQEGDQNNGRVGRAMVFQEILHDEQLGFEQKIEEENTQSMLEGENLLIEDLPGSPAIRRSINQAVRIVDEIVGIAGHAPDNIFIEVTREDDTKKKGKRTTTRYSNIQKALEALKEEGAEALRELKTYKHNELDKRLSLYFMQNGKSLYSGIPLDIRRLSEYQIDHIIPQSYIKDDSYENMALVLPGENQSKADNLLISQDIRIKMKATWTALHKAGLMGDKKYNNLMNSSISDAKMKGFINRQLVETSQSVKLTQMMLSQKYPGAKVRPIKASISSQLRDACDLVKCREANDYHHAHDAYLACQVGRFVLKRHSSMFDNPIGMTKVIRDFVKRQGQEFKRNGKLPAYASRSGFIVQSFMRSGFDAETGELLRDDWNAPFEIARIKRCLNYRDCYISRMPMEDSGAFWDATIYSPKAGKKGALPVKQGLPVEKYGSYSREQFAYFFVYKAYNPKKKAYRLEFEAVPVRVASAVETRENALEEYAKSVAKQAGLEFVEVARPKVYKYQLIELGEDRLYITGKREVRNASQLAFSLDEIDLLKRLAEGEETSSEERERLFDVLIEKYARYAPRLARQLSVDSMSATFETLNAEEQLGILLSLVEIANGKRNMIDLSSAGGSKNAGCMNPTFSSELSSPGSNFTFIDQSVTGMFERRQRLEL

SEQ ID NO: 186 - protein, 1195 aa, Elusimicrobium minutum
MQKNINTKQNHIYIKQAQKIKEKLGDKPYRIGLDLGVGSIGFAIVSMEENDGNVLLPKEIIMVGSRIFKASAGAADRKLSRGQRNNHRHTRERMRYLWKVLAEQKLALPVPADLDRKENSSEGETSAKRFLGDVLQKDIYELRVKSLDERLSLQELGYVLYHIAGHRGSSAIRTFENDSEEAQKENTENKKIAGNIKRLMAKKNYRTYGEYLYKEFFENKEKHKREKISNAANNHKFSPTRDLVIKEAEAILKKQAGKDGFHKELTEEYIEKLTKAIGYESEKLIPESGFCPYLKDEKRLPASHKLNEERRLWETLNNARYSDPIVDIVTGEITGYYEKQFTKEQKQKLFDYLLTGSELTPAQTKKLLGLKNTNFEDIILQGRDKKAQKIKGYKLIKLESMPFWARLSEAQQDSFLYDWNSCPDEKLLTEKLSNEYHLTEEEIDNAFNEIVLSSSYAPLGKSAMLIILEKIKNDLSYTEAVEEALKEGKLTKEKQAIKDRLPYYGAVLQESTQKIIAKGFSPQFKDKGYKTPHTNKYELEYGRIANPVVHQTLNELRKLVNEIIDILGKKPCEIGLETARELKKSAEDRSKLSREQNDNESNRNRIYEIYIRPQQQVIITRRENPRNYILKFELLEEQKSQCPFCGGQISPNDIINNQADIEHLFPIAESEDNGRNNLVISHSACNADKAKRSPWAAFASAAKDSKYDYNRILSNVKENIPHKAWRFNQGAFEKFIENKPMAARFKTDNSYISKVAHKYLACLFEKPNIICVKGSLTAQLRMAWGLQGLMIPFAKQLITEKESESFNKDVNSNKKIRLDNRHHALDAIVIAYASRGYGNLLNKMAGKDYKINYSERNWLSKILLPPNNIVWENIDADLESFESSVKTALKNAFISVKHDHSDNGELVKGTMYKIFYSERGYTLTTYKKLSALKLTDPQKKKTPKDFLETALLKFKGRESEMKNEKIKSAIENNKRLFDVIQDNLEKAKKLLEEENEKSKAEGKKEKNINDASIYQKAISLSGDKYVQLSKKEPGKFFAISKPTPTTTGYGYDTGDSLCVDLYYDNKGKLCGEIIRKIDAQQKNPLKYKEQGFTLFERIYGGDILEVDFDIHSDKNSFRNNTGSAPENRVFIKVGTFTEITNNNIQIWFGNIIKSTGGQDDSFTINSMQQYNPRKLILSSCGFIKYRSPILKNKEG

SEQ ID NO: 187 - protein, 1337 aa, Enterococcus faecalis
  Enterococcus faecalis ATCC 29200
MKKDYVIGLDIGTNSVGWAVMTEDYQLVKKKMPIYGNTEKKKIKKNFWGVRLFEEGHTAEDRRLKRTARRRISRRRNRLRYLQAFFEEAMTDLDENFFARLQESFLVPEDKKWHRHPIFAKLEDEVAYHETYPTIYHLRKKLADSSEQADLRLIYLALAHIVKYRGHFLIEGKLSTENISVKEQFQQFMIIYNQTFVNGESRLVSAPLPESVLIEEELTEKASRTKKSEKVLQQFPQEKANGLFGQFLKLMVGNKADFKKVFGLEEEAKITYASESYEEDLEGILAKVGDEYSDVFLAAKNVYDAVELSTILADSDKKSHAKLSSSMIVRFTEHQEDLKKFKRFIRENCPDEYDNLFKNEQKDGYAGYIAHAGKVSQLKFYQYVKKIIQDIAGAEYFLEKIAQENFLRKQRTFDNGVIPHQIHLAELQAIIHRQAAYYPFLKENQEKIEQLVTFRIPYYVGPLSKGDASTFAWLKRQSEEPIRPWNLQETVDLDQSATAFIERMTNFDTYLPSEKVLPKHSLLYEKFMVFNELTKISYTDDRGIKANFSGKEKEKIFDYLFKTRRKVKKKDIIQFYRNEYNTEIVTLSGLEEDQFNASFSTYQDLLKCGLTRAELDHPDNAEKLEDIIKILTIFEDRQRIRTQLSTFKGQFSAEVLKKLERKHYTGWGRLSKKLINGIYDKESGKTILGYLIKDDGVSKHYNRNFMQLINDSQLSFKNAIQKAQSSEHEETLSETVNELAGSPAIKKGIYQSLKIVDELVAIMGYAPKRIVVEMARENQTTSTGKRRSIQRLKIVEKAMAEIGSNLLKEQPTTNEQLRDTRLFLYYMQNGKDMYTGDELSLHRLSHYDIDHIIPQSFMKDDSLDNLVLVGSTENRGKSDDVPSKEVVKDMKAYWEKLYAAGLISQRKFQRLTKGEQGGLTLEDKAHFIQRQLVETRQITKNVAGILDQRYNANSKEKKVQIITLKASLTSQFRSIFGLYKVREVNDYHHGQDAYLNCVVATTLLKVYPNLAPEFVYGEYPKFQTFKENKATAKAIIYTNLLRFFTEDEPRFTKDGEILWSNSYLKTIKKELNYHQMNIVKKVEVQKGGFSKESIKPKGPSNKLIPVKNGLDPQKYGGFDSPIVAYTVLFTHEKGKKPLIKQEILGITIMEKTRFEQNPILFLEEKGFLRPRVLMKLPKYTLYEFPEGRRRLLASAKEAQKGNQMVLPEHLLTLLYHAKQCLLPNQSESLAYVEQHQPEFQEILERVVDFAEVHTLAKSKVQQIVKLFEANQTADVKEIAASFIQLMQFNAMGAPSTFKFFQKDIERARYTSIKEIFDATIIYQSTTGLYETRRKVVD

SEQ ID NO: 188 - protein, 1337 aa, Enterococcus faecalis
  Enterococcus faecalis ATCC 4200
MKKDYVIGLDIGTNSVGWAVMTEDYQLVKKKMPIYGNTEKKKIKKNFWGVRLFEEGHTAEDRRLKRTARRRISRRRNRLRYLQAFFEEAMTALDENFFARLQESFLVPEDKKWHRHPIFAKLEDEVAYHETYPTIYHLRKKLADSSEQADLRLIYLALAHIVKYRGHFLIEGKLSTENISVKEQFQQFMIIYNQTFVNGESRLVSAPLPESVLIEEELTEKASRTKKSEKVLQQFPQEKANGLFGQFLKLMVGNKADFKKVFGLEEEAKITYASESYEEDLEGILAKVGDEYSDVFLAAKNVYDAVELSTILADSDKKSHAKLSSSMIVRFTEHQEDLKKFKRFIRENCPDEYDNLFKNEQKDGYAGYIAHAGKVSQLKFYQYVKKIIQDIAGAEYFLEKIAQENFLRKQRTFDNGVIPHQIHLAELQAIIHRQAAYYPFLKENQEKIEQLVTFRIPYYIGPLSKGDASTFAWLKRQSEEPIRPWNLQETVDLDQSATAFIERMTNFDTYLSSEKVLPKHSLLYEKFMVFNELTKISYTDDRGIKANFSGKEKEKIFDYLFKTRRKVKKKDIIQFYRNEYNTEIVTLSGLEEDQFNASFSTYQDLLKCGLTRAELDHPDNAEKLEDIIKILTIFEDRQRIRTQLSTFKGQFSAEVLKKLERKHYTGWGRLSKKLINGIYDKESGKTILGYLIKDDGVSKHYNRNFMQLINDSQLSFKNAIQKAQSSEHEETLSETVNELAGSPAIKKGIYQSLKIVDELVAIMGYAPKRIVVEMARENQTTSTGKRRSIQRLKIVEKAMAEIGSNLLKEQPTTNEQLRDTRLFLYYMQNGKDMYTGDELSLHRLSHYDIDHIIPQSFMKDDSLDNLVLVGSTENRGKSDDVPSKEVVKDMKAYWEKLYAAGLISQRKFQRLTKGEQGGLTLEDKAHFIQRQLVETRQITKNVAGILDQRYNANSKEKKVQIITLKASLTSQFRSIFGLYKVREVNDYHHGQDAYLNCVVATTLLKVYPNLAPEFVYGEYPKFQAFKENKATAKAIIYTNLLRFFTEDEPRFTKDGEILWSNSYLKTIKKELNYHQMNIVKKVEVQKGGFSKESIKPKGPSNKLIPVKNGLDPQKYGGFDSPVVAYTVLFTHEKGKKPLIKQEILGITIMEKTRFEQNPILFLEEKGFLRPRVLMKLPKYTLYEFPEGRRRLLASAKEAQKGNQMVLPEHLLTLLYHAKQCLLPNQSESLAYVEQHQPEFQEILERVVDFAEVHTLAKSKVQQIVKLFEANQTADVKEIAASFIQLMQFNAMGAPSTFKFFQKDIERARYTSIKEIFDATIIYQSTTGLYETRRKVVD

SEQ ID NO: 189 - protein, 1337 aa, Enterococcus faecalis
  Enterococcus faecalis D6
MKKDYVIGLDIGTNSVGWAVMTEDYQLVKKKMPIYGNTEKKKIKKNFWGVRLFEEGHTAEDRRLKRTARRRISRRRNRLRYLQAFFEEAMTALDENFFARLQESFLVPEDKKWHRHPIFAKLEDEVAYHETYPTIYHLRKKLADSSEQADLRLIYLALAHIVKYRGHFLIEGKLSTENISVKEQFQQFMIIYNQTFVNGESRLVSAPLPESVLIEEELTEKASRTKKSEKVLQQFPQEKANGLFGQFLKLMVGNKADFKKVFGLEEEAKITYASESYEEDLEGILAKVGDEYSDVFLAAKNVYDAVELSTILADSDKKSHAKLSSSMIVRFTEHQEDLKNFKRFIRENCPDEYDNLFKNEQKDGYAGYITHAGKVSQLKFYQYVKKIIQDIAGAEYFLEKIAQENFLRKQRTFDNGVIPHQIHLAELQAIIHRQAAYYPFLKENQEKIEQLVTFRIPYYVGPLSKGDANTFAWLKRQSEEPIRPWNLQETVDLDQSATAFIERMTNFDTYLPSEKVLPKHSLLYEKFMVFNELTKISYTDDRGIKANFSGKEKEKIFDYLFKTRRKVKKKDIIQFYRNEYNTEIVTLSGLEEDQFNASFSTYQDLLKCGLTRAELDHPDNAEKLEDIIKILTIFEDRQRIRTQLSTFKGQFSAEVLKKLERKHYTGWGRLSKKLINGIYDKESGKTILDYLIKDDGVSKHYNRNFMQLINDSQLSFKNAIQKAQSSEHEETLSETVNELAGSPAIKKGIYQSLKIVDELVAIMGYAPKRIVVEMARENQTTSTGKRRSIQRLKIVEKAMAEIGSNLLKEQPTTNEQLRDTRLFLYYMQNGKDMYTGDELSLHRLSHYDIDHIIPQSFMKDDSLDNLVLVGSTENRGKSDDVPSKEVVKDMKAYWEKLYAAGLISQRKFQRLTKGEQGGLTLEDKAHFIQRQLVETRQITKNVAGILDQRYNAKSKEKKVQIITLKASLTSQFRSIFGLYKVREVNDYHHGQDAYLNCVVATTLLKVYPNLAPEFVYGEYPKFQTFKENKATAKAIIYTNLLRFFTEDEPRFTKDGEILWSNSYLKTIKKELNYHQMNIVKKVEVQKGGFSKESIKPKGPSNKLIPVKNGLDPQKYGGFDSPIVAYTVLFTHEKGKKPLIKQEILGITIMEKTRFEQNPILFLEEKGFLRPRVLMKLPKYTLYQFPEGRRRLLASAKEAQKGNQMVLPEHLLTLLYHAKQCLLPNQSESLAYVEQHQPEFQEILERVVDFAEVHTLAKSKVQQIVKLFEANQTADVKEIAASFIQLMQFNAMGAPSTFKFFQKDIERARYTSIKEIFDATIIYQSTTGLYETRRKVVD

SEQ ID NO: 190 - protein, 1337 aa, Enterococcus faecalis
  Enterococcus faecalis E1Sol
MKKDYVIGLDIGTNSVGWAVMTEDYQLVKKKMPIYGNTEKKKIKKNFWGVRLFEEGHTAEDRRLKRTARRRISRRRNRLRYLQAFFEEAMTDLDENFFARLQESFLVPEDKKWHRHPIFAKLEDEVAYHETYPTIYHLRKKLADSSEQADLRLIYLALAHIVKYRGHFLIEGKLSTENTSVKEQFQQFMVIYNQTFVNGESRLVSAPLPESVLIEEELTEKASRTKKSEKVLQQFPQEKANGLFGQFLKLMVGNKADFKKVFGLEEEAKITYASESYEEDLEGILAKVGDEYSDVFLAAKNVYDAVELSTILADSDKKSHAKLSSSMIVRFTEHQEDLKKFKRFIRENCPDEYDNLFKNEQKDGYAGYIAHAGKVSQLKFYQYVKKIIQDIAGAEYFLEKIAQENFLRKQRTFDNGVIPHQIHLAELQAIIHRQAAYYPFLKENQEKIEQLVTFRIPYYVGPLSKGDASTFAWLKRQSEEPIRPWNLQETVDLDQSATAFIERMTNFDTYLPSEKVLPKHSLLYEKFMVFNELTKISYTDDRGIKANFSGKEKEKIFDYLFKTRRKVKKKDIIQFYRNEYNTEIVTLSGLEEDQFNASFSTYQDLLKCGLTRAELDHPDNAEKLEDIIKILTIFEDRQRIRTQLSTFKGQFSAEVLKKLERKHYTGWGRLSKKLINGIYDKESGKTILDYLVKDDGVSKHYNRNFMQLINDSQLSFKNAIQKAQSSEHEETLSETVNELAGSPAIKKGIYQSLKIVDELVAIMGYAPKRIVVEMARENQTTSTGKRRSIQRLKIVEKAMAEIGSNLLKEQPTTNEQLRDTRLFLYYMQNGKDMYTGDELSLHRLSHYDIDHIIPQSFMKDDSLDNLVLVGSTENRGKSDDVPSKKVVKKMKAYWEKLYAAGLISQRKFQRLTKGEQGGLTLEDKAHFIQRQLVETRQITKNVAGILDQRYNAKSKEKKVQIITLKASLTSQFRSIFGLYKVREVNDYHHGQDAYLNCVVATTLLKVYPNLAPEFVYGEYPKFQAFKENKATAKTIIYTNLMRFFTEDEPRFTKDSEILWSNSYLKTIKKELNYHQMNIVKKVEVQKGGFSKESIKPKGPSNKLIPVKNGLDPQKYGGFDSPVVAYTVLFTHEKGKKPLIKQEILGITIMEKTRFEQNPILFLEEKGFLRPRVLMKLPKYTLYEFPEGRRRLLASAKEAQKGNQMVLPEHLLTLLYHAKQCLLPNQSESLAYVEQHQPEFQEILERVVDFAEVHTLAKSKVQQIVKLFEANQTADVKEIAASFIQLMQFNAMGAPSTFKFFQKDIERARYTSIKEIFDATIIYQSTTGLYETRRKVVD

SEQ ID NO: 191 - protein, 1150 aa, Enterococcus faecalis
  Enterococcus faecalis Fly1
MYSIGLDLGISSVGWSVIDERTGNVIDLGVRLFSAKNSEKNLERRTNRGGRRLIRRKTNRLKDAKKILAAVGFYEDKSLKNSCPYQLRVKGLTEPLSKGEIYKVTLHILKKRGISYLDEDDTEAAKESQDYKEQVRKNAQLLTKYTPGQIQLQRLKENNRVKTGINAQGNYQLNVFKVSAYANELATILKTQQAFYPNELTDDWIALFVQPGIAEEAGLIYRKRPYYHGPGNEANNSPYGRWSDFKKTGQPATNIFDRLIGKDFQGELRASGLSLSAQQYNLLNDLTNLKIDGEIPLSPEQKEYILAELMTKEFTRFGVNDVAKLLGVKKERLSGWRLDKKGKPEIHTLKGYRNWRKIFAESGIDLATLPTETIDCLAKVLTLNTEHEGIENTLAFELPELAESVKLLVLDRYKELSQSVSTQAWHRFSLKTLHLLIPELMNATSEQNTLLEQFQLKSDVRKRYSEYKKLPTKDVLTEIYNPTVNKTVSQAFKVIDALLVKYGKEQIRYITIEMPRDDNEEDEKKRIKELHAKNSQRKNDSQSYFMQKSGWSQEKFQTTIQKNRRFLAKLLYYYEQDGICAYTGLSISPELLVSDSTEIDHIIPISISLDDSINNKVLVLSKANQVKGQQTPYDAWMDGSFKKINGKFSNWDDYQKWVESRHFSHKKENNLLETRNIFDSEQVEKFLARNLNDTRYASRLVLNTLQSFFANHETKVRVVNGSFTHTLRKKWGADLDKTRETHHHHAVDATLCAVTPFVKVSRYHYAVKEETGEKVMREIDFETGEIVDEMSYQEFKKSKKYERKTYQVKWPNFREQLKPVNLHPRIKFSHQVDRKANRKLSDATIYSVREKTEVKTLKSGKQKITTDEYTIGKIKDIYTVDGWEAFKKKQDKLLMKDLDEKTYERLLSIAETTPDFQEVEEKNGKVKRVKRSPFAVYCEENDIPAIQKYAKKNNGPLIRSLKYYDGKLNKHINITKDSQGRPVEKTKNGRKVTLQSLKPYRYDIYQDLETKAYYTVQLYYSDLRFVEGKYGITEKEYMKKVAEQTKGQVVRFCFSLQKNDGLEIEWKDSQRYDVRFYNFQSANSINFKGLEQEMMPAENQFKQKPYNNGAINLNIAKYGKEGKKLRKFNTDILGKKHYLYYEKEPKNIIK

SEQ ID NO: 192 - protein, 1337 aa, Enterococcus faecalis
MKKDYVIGLDIGTNSVGWAVMTEDYQLVKKKMPIYGNTEKKKIKKNFWGVRLFEEGHTAEDRRLKRTARRRISRRRNRLRYLQAFFEEAMTDLDENFFARLQESFLVPEDKKWHRHPIFAKLEDEVAYHETYPTIYHLRKKLADSSEQADLRLIYLALAHIVKYRGHFLIEGKLSTENISVKEQFQQFMIIYNQTFVNGESRLVSAPLPESVLIEEELTEKASRTKKSEKVLQQFPQEKANGLFGQFLKLMVGNKADFKKVFGLEEEAKITYASESYEEDLEGILAKVGDEYSDVFLAAKNVYDAVELSTILADSDKKSHAKLSSSMIVRFTEHQEDLKKFKRFIRENCPDEYDNLFKNEQKDGYAGYIAHAGKVSQLKFYQYVKKIIQDIAGAEYFLEKIAQENFLRKQRTFDNGVIPHQIHLAELQAIIHRQAAYYPFLKENQEKIEQLVTFRIPYYVGPLSKGDASTFAWLKRQSEEPIRPWNLQETVDLDQSATAFIERMTNFDTYLPSEKVLPKHSLLYEKFMVFNELTKISYTDDRGIKANFSGKEKEKIFDYLFKTRRKVKKKDIIQFYRNEYNTEIVTLSGLEEDQFNASFSTYQDLLKCGLTRAELDHPDNAEKLEDIIKILTIFEDRQRIRTQLSTFKGQFSAEVLKKLERKHYTGWGRLSKKLINGIYDKESGKTILDYLVKDDGVSKHYNRNFMQLINDSQLSFKNAIQKAQSSEHEETLSETVNELAGSPAIKKGIYQSLKIVDELVAIMGYAPKRIVVEMARENQTTSTGKRRSIQRLKIVEKAMAEIGSNLLKEQPTTNEQLRDTRLFLYYMQNGKDMYTGDELSLHRLSHYDIDHIIPQSFMKDDSLDNLVLVGSTENRGKSDDVPSKEVVKDMKAYWEKLYAAGLISQRKFQRLTKGEQGGLTLEDKAHFIQRQLVETRQITKNVAGILNQRYNANSKEKKVQIITLKASLTSQFRSIFGLYKVREVNDYHHGQDAYLNCVVATTLLKVYPNLAPEFVYGEYPKFQTFKENKATAKAIIYTNLLRFFTEDEPRFTKDGEILWSNSYLKTIKKELNYHQMNIVKKVEVQKGGFSKESIKPKGPSNKLIPVKNGLDPQKYGGFDSPVVAYTVLFTHEKGKKPLIKQEILGITIMEKTRFEQNPILFLEEKGFLRPRVLMKLPKYTLYEFPEGRRRLLASAKEAQKGNQMVLPEHLLTLLYHAKQCLLPNQSESLAYVEQHQPEFQEILERVVDFAEVHTLAKSKVQQIVKLFEANQTADVKEIAASFIQLMQFNAMGAPSTFKFFQKDIERARYTSIKEIFDATIIYQSTTGLYETRRKVVD

SEQ ID NO: 193 - protein, 1150 aa, Enterococcus faecalis
  Enterococcus faecalis R508
MYSIGLDLGISSVGWSVIDERTGNVIDLGVRLFSAKNSEKNLERRTNRGGRRLIRRKTNRLKDAKKILAAVGFYEDKSLKNSCPYQLRVKGLTEPLSKGEIYKVTLHILKKRGISYLDEDDTEAAKESQDYKEQVRKNAQLLTKYTPGQIQLQRLKENNRVKTGINVQGNYQLNVFKVSAYANELATILKTQQAFYPNELTDDWIALFVQPGIAEEAGLIYRKRPYYHGPGNEANNSPYGRWSDFQKTGEPATNIFDKLIGKDFQGELRASGLSLSAQQYNLLNDLTNLKIDGEVPLSSEQKEYILTELMTKEFTRFGVNDVVKLLGVKKERLSGWRLDKKGKPEIHTLKGYRNWRKIFAEAGIDLATLPTETIDCLAKVLTLNTEREGIENTLAFELPELSESVKLLVLDRYKELSQSISTQSWHRFSLKTLHLLIPELMNATSEQNTLLEQFQLKSDVRKRYSEYKKLPTKDVLAEIYNPTVNKTVSQAFKVIDALLVKYGKEQIRYITIEMPRDDNEEDEKKRIKELHAKNSQRKNDSQSYFMQKSGWSQEKFQTTIQKNRRFLAKLLYYYEQDGICAYTGLPISPELLVSDSTEIDHIIPISISLDDSINNKVLVLSKANQVKGQQTPYDAWMDGSFKKINGKFSNWDDYQKWVESRHFSHKKENNLLETRNIFDSEQVEKFLARNLNDTRYASRLVLNTLQSFFTNQETKVRVVNGSFTHTLRKKWGADLDKTRETHHHHAVDATLCAVTPFVKVSRYHYAVKEETGEKVMREIDFETGEIVNEMSYREFKKSKKYERKTYQVKWPNFREQLKPVNLHPRIKFSHQVDRKANRKLSDATIYSVREKTEVKTLKSGKQKITTDEYTIGKIKDIYTLDGWEAFKKKQDKLLMKDLDEKTYERLLSIAETTPDFQEVEEKNGKVKRVKRSPFAVYCEENDIPAIQKYAKKNNGPLIRSLKYYDGKLNKHINITKDSQGRPVEKTKNGRKVTLQSLKPYRYDIYQDLETKAYYTVQLYYSDLRFVEGKYGITEKEYMKKVAEQTKGQVVRFCFSLQKNDGLEIEWKDSQRYDVRFYNFQSANSINFKGLEQEIMPAENQFKQKPYNNGAINLNIAKYGKEGKKLRKFNTDILGKKHYLFYEKEPKNIIK

SEQ ID NO: 194 - protein, 1150 aa, Enterococcus faecalis
  Enterococcus faecalis T11
MYSIGLDLGISSVGWSVIDERTGNVIDLGVRLFSAKNSEKNLERRTNRGGRRLIRRKTNRLKDAKKILAAVGFYEDKSLKNSCPYQLRVKGLTEPLSKGEIYKVTLHILKKRGISYLDEDDTEAAKESQDYKEQVRENAQLLTKYTPGQIQLQRLKENNRVKTGINAQGNYQLNVFKVSAYANELATILKTQQAFYPNELTDDWIALFVQPGIAEEAGLIYRKRPYYHGPGNEANNSPYGRWSDFKKTGQPATNIFDKLIGKDFQGELRASGLSLSAQQYNLLNDLTNLKIDGEIPLSPEQKEYILAELMTKEFTRFGVNDVVKLLGVKKERLSGWRLDKKGKPEIHTLKGYRNWRKIFAESGIDLAMLPTETIDCLAKILTLNTEREGIENTLAFELPELAESVKLLVLDRYKELSQSVSTQAWHRFSLKTLHLLIPELMNATSEQNTLLEQFQLKSDVRKRYSEYKKLPTKDVLTEIYNPTVNKTVSQAFKVIDALLVKYGKEQIRYITIEMPRDDNEEDEKKRIKELHAKNSQRKNDSQSYFMQKSGWSQEKFQTTIQKNRRFLAKLLYYYEQDGICAYTGLSISPELLVSDSTEIDHIIPISISLDDSINNKVLVLSKANQVKGQQTPYDAWMDGSFKKINGKFSNWDDYQKWVESRHFSHKKENNLLETRNIFDSEQVEKFLARNLNDTRYASRLVLNTLQSFFANQETKVRVVNGSFTHTLRKKWGADLDKTRETHHHHAVDATLCAVTPFVKVSRYHYAVKEETGEKVMREIDFETGEIVDEMSYREFKKSKKYERKTYQVKWPNFREQLKPVNLHPRIKFSHQVDRKANRKLSDATIYSVREKTEVKTLKSGKQKITTDEYTIGKIKDIYTVDGWEAFKKKQDKLLMKDLDEKTYERLLSIAETTPDFQEVEEKNGKVKRVKRSPFAVYCEENDIPAIRKYAKKNNGPLIRSLKYYDGKLNKHINITKDSQGRPVEKTKNGRKVTLQSLKPYRYDIYQDLETKAYYTVQLYYSDLRFVEGKYGITEKEYMKKVAEQTKGQVVRFCFSLQKNDGLEIEWKDSQRYDVRFYNFQSANSINFKGLEQEMMPAENQFKQKPYNNGAINLNIAKYGKEGKKLRKFNTDILGKKHYLYYEKEPKNIIK

SEQ ID NO: 195 - protein, 1150 aa, Enterococcus faecalis
  Enterococcus faecalis TX0012
MYSIGLDLGISSVGWSVIDERTGNVIDLGVRLFSAKNSEKNLERRTNRGGRRLIRRKTNRLKDAKKILAAVGFYEDKSLKNSCPYQLRVKGLTEPLSRGEIYKVTLHILKKRGISYLDEVDTEAAKESQDYKEQVRKNAQLLTKYTPGQIQLQRLKENNRVKTGINAQGNYQLNVFKVSAYANELATILKTQQAFYPNELTDDWIALFVQPGIAEEAGLIYRKRPYYHGPGNEANNSPYGRWSDFQKTGEPATNIFDKLIGKDFQGELRASGLSLSAQQYNLLNDLTNLKIDGEVPLSSEQKEYILTELMTKEFTRFGVNDVVKLLGVKKERLSGWRLDKKGKPEIHTLKGYRNWRKIFAEAGIDLATLPTETIDCLAKVLTLNTEREGIENTLAFELPELSESVKLLVLDRYKELSQSISTQSWHRFSLKTLHLLIPELMNATSEQNTLLEQFQLKSDVRKRYSEYKKLPTKDVLAEIYNPTVNKTVSQAFKVIDALLVKYGKEQIRYITIEMPRDDNEEDEKKRIKELHAKNSQRKNDSQSYFMQKSGWSQEKFQTTIQKNRRFLAKLLYYYEQDGICAYTGLPISPELLVSDSTEIDHIIPISISLDDSINNKVLVLSKANQVKGQQTPYDAWMDGSFKKINGKFSNWDDYQKWVESRHFSHKKENNLLETRNIFDSEQVEKFLARNLNDTRYASRLVLNTLQSFFTNQETKVRVVNGSFTHTLRKKWGADLDKTRETHHHHAVDATLCAVTSFVKVSRYHYAVKEETGEKVMREIDFETGEIVNEMSYWEFKKSKKYERKTYQVKWPNFREQLKPVNLHPRIKFSHQVDRKANRKLSDATIYSVREKTEVKTLKSGKQKITTDEYTIGKIKDIYTLDGWEAFKKKQDKLLMKDLDEKTYERLLSIAETTPDFQEVEEKNGKVKRVKRSPFAVYCEENDIPAIQKYAKKNNGPLIRSLKYYDGKLNKHINITKDSQGRPVEKTKNGRKVTLQSLKPYRYDIYQDLETKAYYTVQLYYSDLRFVEGKYGITEKEYMKKVAEQTKGQVVRFCFSLQKNDGLEIEWKDSQRYDVRFYNFQSANSINFKGLEQEMMPAENQFKQKPYNNGAINLNIAKYGKEGKKLRKFNTDILGKKHYLFYEKEPKNIIK

SEQ ID NO: 196 - protein, 1150 aa, Enterococcus faecalis; identical to SEQ ID NO: 195
  Enterococcus faecalis TX0012

SEQ ID NO: 197 - protein, 1337 aa, Enterococcus faecalis
  Enterococcus faecalis TX0470
MKKDYVIGLDIGTNSVGWAVMTEDYQLVKKKMPIYGNTEKKKIKKNFWGVRLFEEGHTAEDRRLKRTARRRISRRRNRLRYLQAFFEEAMTALDENFFARLQESFLVPEDKKWHRHPIFAKLEDEVAYHETYPTIYHLRKKLADSSEQADLRLIYLALAHIVKYRGHFLIEGKLSTENISVKEQFQQFMIIYNQTFVNGESRLVSTPLPESVLIEEELTEKASRTKKSEKVLQQFPQEKANGLFGQFLKLMVGNKADFKKVFGLEEEAKITYASESYEEDLEGILAKVGDEYSDVFLAAKNVYDAVELSTILADSDKKSHAKLSSSMIVRFTEHQEDLKNFKRFIRENCPDEYDNLFKNEQKDGYAGYITHAGKVSQLKFYQYVKKIIQDIAGAEYFLEKIAQENFLRKQRTFDNGVIPHQIHLAELQAIIHRQAAYYPFLKENQEKIEQLVTFRIPYYVGPLSKGDASTFAWLKRQSEEPIRPWNLQETVDLDQSATAFIERMTNFDTYLPSEKVLPKHSLLYEKFMVFNELTKISYTDDRGIKANFSGKEKEKIFDYLFKTRRKVKKKDIIQFYRNEYNTEIVTLSGLEEDQFNASFSTYQDLLKCGLTRAELDHPDNAEKLEDIIKILTIFEDRQRIRTQLSTFKGQFSAEVLKKLERKHYTGWGRLSKKLINGIYDKESGKTILDYLVKDDGVSKHYNRNFMQLINDSQLSFKNAIQKAQSSEHEETLSETVNELAGSPAIKKGIYQSLKIVDELVAIMGYAPKRIVVEMARENQTTSTGKRRSIQRLKIVEKAMAEIGSNLLKEQPTTNEQLRDTRLFLYYMQNGKDMYTGDELSLHRLSHYDIDHIIPQSFMKDDSLDNLVLVGSTENRGKSDDVPSKEVVKDMKAYWEKLYAAGLISQRKFQRLTKGEQGGLTLEDKAHFIQRQLVETRQITKNVAGILDQRYNAKSKEKKVQIITLKASLTSQFRSIFGLYKVREVNDYHHGQDAYLNCVVATTLLKVYPNLAPEFVYGEYPKFQTFKENKATAKAIIYTNLLRFFTEDEPRFTKDGEILWSNSYLKTIKKELNYHQMNIVKKVEVQKGGFSKESIKPKGPSNKLIPVKNGLDPQKYGGFDSPIVAYTVLFTHEKGKKPLIKQEILGITIMEKTRFEQNPILFLEEKGFLRPRVLMKLPKYTLYEFPEGRRRLLASAKEAQKGNQMVLPEHLLTLLYHAKQCLLPNQSESLAYVEQHQPEFQEILERVVDFAEVHTLAKSKVQQIVKLFEANQTADVKEIAASFIQLMQFNAMGAPSTFKFFQKDIERARYTSIKEIFDATIIYQSTTGLYETRRKVVD

SEQ ID NO: 198 - protein, 1150 aa, Enterococcus faecalis
  Enterococcus faecalis TX1342
MYSIGLDLGVSSVGWSVIDERTGNVIDLGVRLFSAKNSEKNLERRTNRGGRRLIRRKTNRLKDAKKILAAVGFYEDKSLKNSCPYQLRVKGLTEPLSKGEIYKVTLHILKKRGISYLDEDDTEAAKESQDYKEQVRENAQLLTKYTPGQIQLQRLKENNRVKTGINAQGNYQLNVFKVSAYANELATILKTQQAFYPNELTDDWIALFVQPGIAEEAGLIYRKRPYYHGPGNEANNSPYGRWSDFKKTGQPATNIFDKLIGKDFQGELRASGLSLSAQQYNLLNDLTNLKIDGEIPLSPEQKEYILAELMTKEFTRFGINDVAKLLGVKKERLSGWRLDKKGKPEIHTLKGYRNWRKIFAESGIDLATLPTETIDCLAKVLTLNTEREGIENTLAFELPELAESVKLLVLDRYKELSQSVSTQAWHRFSLKTLHLLIPELMNATSEQNTLLEQFQLKSDVRKRYSEYKKLPTKDVLTEIYNPTVNKTVSQAFKVIDALLVKYGKEQIRYITIEMPRDDNEEDEKKRIKELHAKNSQRKNDSQSYFMQKSGWSQEKFQTTIQKNRRFLAKLLYYYEQDGICAYTGLSISPELLVSDSTEIDHIIPISISLDDSINNKVLVLSKANQVKGQQTPYDAWMDGSFKKINGKFSNWDDYQKWVESRHFSHKKENNLLETRNIFDSEQVEKFLARNLNDTRYASRLVLNTLQSFFANQETKVRVVNGSFTHTLRKKWGADLDKTRETHHHHAVDATLCAVTPFVKVSRYHYAVKEETGEKVMREIDFETGEIVDEMSYREFKKSKKYERKTYQVKWPNFREQLKPVNLHPRIKFSHQVDRKANRKLSDATIYSVREKTEVKTLKSGKQKITTDEYTIGKIKDIYTVDGWEAFKKKQDKLLMKDLDEKTYERLLSIAETTPDFQEVEEKNGKVKRVKRSPFAVYCEENDIPAIRKYAKNNNGPLIRSLKYYDGKLNKHINITKDSQGRPVEKTKNGRKVTLQSLKPYRYDIYQDLETKAYYTVQLYYSDLRFVEGKYGITEKEYMKKVAEQTKGQVVRFCFSLQKNDGLEIEWKDSQCYDVRFYNFQSANSINFKGLEQEMMPAENQFKQKPYNNGAINLNIAKYGKEGKKLRKFNTDILGKKHYLYYEKEPKNIIK

SEQ ID NO: 199 - protein, 1337 aa, Enterococcus faecalis
  Enterococcus faecalis TX4244
MKKDYVIGLDIGTNSVGWAVMTEDYQLVKKKMPIYGNTEKKKIKKNFWGVRLFEEGHTAEDRRLKRTARRRISRRRNRLRYLQAFFEEAMTDLDENFFARLQESFLVPEDKKWHRHPIFAKLEDEVAYHETYPTIYHLRKKLADSSEQADLRLIYLALAHIVKYRGHFLIEGKLSTENISVKEQFQQFMIIYNQTFVNGESRLVSAPLPESVLIEEELTEKASRTKKSEKVLQQFPQEKANGLFGQFLKLMVGNKADFKKVFGLEEEAKITYASESYEEDLEGILAKVGDEYSDVFLAAKNVYDAVELSTILADSDKKSHAKLSSSMIVRFTEHQEDLKKFKRFIRENCPDEYDNLFKNEQKDGYAGYIAHAGKVSQLKFYQYVKKIIQDIAGAEYFLEKIAQENFLRKQRTFDNGVIPHQIHLAELQAIIHRQAAYYPFLKENQEKIEQLVTFRIPYYVGPLSKGDASTFAWLKRQSEEPIRPWNLQETVDLDQSATAFIERMTNFDTYLPSEKVLPKHSLLYEKFMVFNELTKISYTDDRGIKANFSGKEKEKIFDYLFKTRRKVKKKDIIQFYRNEYNTEIVTLSGLEEDQFNASFSTYQDLLKCGLTRAELDHPDNAEKLEDIIKILTIFEDRQRIRTQLSTFKGQFSAEVLKKLERKHYTGWGRLSKKLINGIYDKESGKTILGYLIKDDGVSKHYNRNFMQLINDSQLSFKNAIQKAQSSEHEETLSETVNELAGSPAIKKGIYQSLKIVDELVAIMGYAPKRIVVEMARENQTTSTGKRRSIQRLKIVEKAMAEIGSNLLKEQPTTNEQLRDTRLFLYYMQNGKDMYTGDELSLHRLSHYDIDHIIPQSFMKDDSLDNLVLVGSTENLGKSDDVPSKEVVKDMKAYWEKLYAAGLISQRKFQRLTKGEQGGLTLEDKAHFIQRQLVETRQITKNVAGILDQRYNANSKEKKVQIITLKASLTSQFRSIFGLYKVREVNDYHHGQDAYLNCVVATTLLKVYPNLAPEFVYGEYPKFQTFKENKATAKAIIYTNLLRFFTEDEPRFTKDGEILWSNSYLKTIKKELNYHQMNIVKKVEVQKGGFSKESIKPKGPSNKLIPVKNGLDPQKYGGFDSPIVAYTVLFTHEKGKKPLIKQEILGITIMEKTRFEQNPILFLEEKGFLRPRVLMKLPKYTLYEFPEGRRRLLASAKEAQKGNQMVLPEHLLTLLYHAKQCLLPNQSESLAYVEQHQPEFQEILERVVDFAEVHTLAKSKVQQIVKLFEANQTADVKEIAASFIQLMQFNAMGAPSTFKFFQKDIERARYTSIKEIFDATIIYQSTTGLYETRRKVVD

SEQ ID NO: 200 - protein, 1339 aa, Enterococcus faecium
  Enterococcus faecium 1,141,733
MKKEYTIGLDIGTNSVGWSVLTDDYRLVSKKMKVAGNTEKSSTKKNFWGVRLFDEGQTAEARRSKRTARRRLARRRQRILELQKIFAPEILKIDEHFFARLNESFLVLDEKKQSRHPVFATIKQEKSYHQTYPTIYHLRQALADSSEKADIRLVYLAMAHLLKYRGHFLIEGELNTENSSVTETFRQFLSTYNQQFSEADDKQTEKLDEAVDCSFVFTEKMSKTKKAETLLKYFPHEKSNGYLSQFIKLMVGNQGNFKNVFGLEEAKLQFSKETYEEDLEELLEKIGDDYIDLFVQAKNVYDAVLLSEILSDSTKNTRAKLSAGMIRRYDAHKEDLVLLKRFVKENLPKKYRAFFGDNSVNGYAGYIEGHATQEDFYKFVKKELTGIRGSEVFLTKIEQENFLRKQRTFDNGVIPHQIHLTELRAIIANQKKHYPFLKEEQEKLESLLTFKIPYYVGPLAKKQENSPFAWLIRKSEEKIKPWNLPEIVDMEGSAVRFIERMINTDMYMPHNKVLPKNSLLYQKFSIYNELTKVRYQDERGQMNYFSSIEKKEIFHELFEKNRKVTKKDLQEFLYLKYDIKHAELSGIEKAFNASYTTYHDFLTMSENKREMKQWLEDPELASMFEEIIKTLTVFEDREMIKTRLSHHEATLGKHIIKKLTKKHYTGWGRLSKELIQGIRDKQSNKTILDYLINDDDFPHHRNRNFMQLINDDSLSFKKEIKKAQMITDTENLEEIVKELTGSPAIKKGILQSLKIVDEIVGIMGYEPANIVVEMARENQTTGRGLKSSRPRLKALEESLKDFGSQLLKEYPTDNSSLQKDRLYLYYLQNGRDMYTGAPLDIHRLSDYDIDHIIPRSFTTDNSIDNKVLVSSKENRLKKDDVPSEKVVKKMRSFWYDLYSSKLISKRKLDNLTKIKLTEEDKAGFIKRQLVETRQITKHVAGILHHRFNKAEDTNEPIRKVRIITLKSALVSQFRNRFGIYKVREINEYHHAHDAYLNGVVALALLKKYPQLAPEFVYGEYLKFNAHKANKATVKKEFYSNIMKFFESDTPVCDENGEIFWDKSKSIAQVKKVINHHHMNIVKKTEIQKGGFSKETVEPKKDSSKLLPRKNNWDPAKYGGLGSPNVAYTVAFTYEKGKARKRTNALEGITIMEREAFEQSPVLFLKNKGYEQAEIEMKLPKYALFELENGRKRMVASNKEAQKANSFLLPEHLVTLLYHAKQYDEISHKESFDYVNEHHKEFSEVFARVLEFAGKYTLAEKNIEKLEKIYKENQTDDLAKLASSFVNLMQFNAMGAPADFKFFDVTIPRKRYTSLTEIWQSTIIHQSITGLYETRIRMGK

SEQ ID NO: 201 - protein, 1340 aa, Enterococcus faecium
  Enterococcus faecium 1,231,408
MKKEYTIGLDIGTNSVGWSVLTDDYRLVSKKMKVAGNTEKSSTKKNFWGVRLFDEGQTAEARRSKRTARRRLARRRQRILELQKIFAPEILKIDEHFFARLNESFLVPDEKKQSRHPVFATIKQEKSYHQTYPTIYHLRQALADSSEKADIRLVYLAMAHLLKYRGHFLIEGELNTENSSVTETFRQFLSTYNQQFSEAGDKQTEKLDEAVDCSFVFTEKMSKTKKAETLLKYFPHEKSNGYLSQFIKLMVGNQGNFKNVFGLEEEAKLQFSKETYEEDLEELLEKIGDDYIDLFVQAKNVYDAVLLSEILSDSTKNTRAKLSAGMIRRYDAHKEDLVLLKRFVKENLPKKYRAFFGDNSVNGYAGYIEGHATQEAFYKFVKKELTGIRGSEVFLTKIEQENFLRKQRTFDNGVIPHQIHLSELRAIIANQKKHYPFLKEEQEKLESLLTFKIPYYVGPLAKKQENSPFAWLIRKSEEKIKPWNLPEIVDMEGSAVRFIERMINTDMYMPHNKVLPKNSLLYQKFSIYNELTKVRYQDERGQMNYFSSIEKKEIFHELFEKNRKVTKKDLQEFLYLKYDIKHAELSGIEKAFNASYTTYHDFLTMSENKREMKQWLEDPELASMFEEIIKTLTVFEDREMIKTRLSHHEATLGKHIIKKLTKKHYTGWGRLSKELIQGIRDKQSNKTILDYLINDDDFPHHRNRNFMQLINDDSLSFKKEIKKAQMITDTENLEEIVKELTGSPAIKKGILQSLKIVDEIVGIMGYEPANIVVEMARENQTTGRGLKSSRPRLKALEESLKDFGSQLLKEYPTDNSSLQKDRLYLYYLQNGRDMYTGAPLDIHRLSDYDIDHIIPRSFTTDNSIDNKVLVSSKENRLKKDDVPSEKVVKKMRSFWYDLYSSKLISKRKLDNLTKIKLTEEDKAGFIKRQLVETRQITKHVAGILHHRFNKAEDTNDPIRKVRIITLKSALVSQFRNRFGIYKVREINEYHHAHDAYLNGVVALALLKKYPQLAPEFVYGEYLKFNAHKANKATVKKEFYSNIMKFFESDTPVCDENGEIFWDKSKSIAQVKKVINHHHMNIVKKTEIQKGGFSKETVEPKKDSSKLLPRKNNWDPAKYGGLGSPNVAYTVAFTYEKGKARKRTNALEGITIMEREAFEQSPVLFLKNKGYEQAEIEMKLPKYALFELENGRKRMVASNKEAQKANSFLLPEHLVTLLYHAKQYDEISHKESFDYVNEHHKEFSEVFARVLEFAGKYTLAEKNIEKLEKIYKENQTDDLAKLASSFVNLMQFNAMGAPADFKFFDVTIPRKRYTSLTEIWQSTIIHQSITGLYETRIRMGK

SEQ ID NO: 202 - protein, 1339 aa, Enterococcus faecium
  Enterococcus faecium E1133
MKKEYTIGLDIGTNSVGWSVLTDDYRLVSKKMKVAGNTEKSSTKKNFWGVRLFDEGQTAEARRSKRTARRRLARRRQRILELQKIFAPEILKIDEHFFARLNESFLVLDEKKQSRHPVFATIKQEKSYHQTYPTIYHLRQALADSSEKADIRLVYLAMAHLLKYRGHFLIEGELNTENSSVTETFRQFLSTYNQQFSEADDKQTEKLDEAVDCSFVFTEKMSKTKKAETLLKYFPHEKSNGYLSQFIKLMVGNQGNFKNVFGLEEAKLQFSKETYEEDLEELLEKIGDDYIDLFVQAKNVYDAVLLSEILSDSTKNTRAKLSAGMIRRYDAHKEDLVLLKRFVKENLPKKYRAFFGDNSVNGYAGYIEGHATQEDFYKFVKKELTGIRGSEVFLTKIEQENFLRKQRTFDNGVIPHQIHLTELRAIIANQKKHYPFLKEEQEKLESLLTFKIPYYVGPLAKKQENSPFAWLIRKSEEKIKPWNLPEIVDMEGSAVRFIERMINTDMYIPHNKVLPKNSLLYQKFSIYNELTKVRYQDERGQMNYFSSIEKKEIFHELFEKNRKVTKKDLQEFLYLKYDIKHAELSGIEKAFNASYTTYHDFLTMSENKREMKQWLEDPELASMFEEIIKTLTVFEDREMIKTRLSHHEATLGKHIIKKLTKKHYTGWGRLSKELIQGIRDKQSNKTILDYLINDDDFPHHRNRNFMQLINDDSLSFKKEIKKAQMITDTENLEEIVKELTGSPAIKKGILQSLKIVDEIVGIMGYEPANIVVEMARENQTTGRGLKSSRPRLKALEESLKDFGSQLLKEYPTDNSSLQKDRLYLYYLQNGRDMYTGAPLDIHRLSDYDIDHIIPRSFTTDNSIDNKVLVSSKENRLKKDDVPSEKVVKKMRSFWYDLYSSKLISKRKLDNLTKIKLTEEDKAGFIKRQLVETRQITKHVAGILHHRFNKAEDTNEPIRKVRIITLKSALVSQFRNRFGIYKVREINEYHHAHDAYLNGVVALALLKKYPQLAPEFVYGEYLKFNAHKANKATVKKEFYSNIMKFFESDTPVCDENGEIFWDKSKSIAQVKKVINHHHMNIVKKTEIQKGGFSEETVEPKKDSSKLLPRKNNWDPAKYGGLGSPNVAYTVAFTYEKGKARKRTNALEGITIMEREAFEQSPVLFLKNKGYEQAEIEMKLPKYALFELENGRKRMVASNKEAQKANSFLLPEHLVTLLYHAKQYDEISHKESFDYVNEHHKEFSEVFARVLEFAGKYTLAEKNIEKLEKIYKENQTDDLAKLASSFVNLMQFNAMGAPADFKFFDVTIPRKRYTSLTEIWQSTIIHQSITGLYETRIRMGK

SEQ ID NO: 203 - protein, 1340 aa, Enterococcus faecium
  Enterococcus faecium E3083
MKKEYTIGLDIGTNSVGWSVLTDDYRLVSKKMKVAGNTEKSSTKKNFWGVRLFDEGQTAEARRSKRTARRRLARRRQRILELQKIFAPEILKIDEHFFARLNESFLVLDEKKQSRHPVFATIKQEKSYHQTYPTIYHLRQALADSSEKADIRLVYLAMAHLLKYRGHFLIEGELNTENSSVTETFRQFLSTYNQQFSEADDKQTEKLDEAVDCSFVFTEKMSKTKKAETLLKYFPHEKSNGYLSQFIKLMVGNQGNFKNVFGLEEEAKLQFSKETYEEDLEELLEKIGDDYIDLFVQAKNVYDAVLLSEILSDSTKNTRAKLSAGMIRRYDAHKEDLVLLKRFVKENLPKKYRAFFGDNSVNGYAGYIEGHATQEDFYKFVKKELTGIRGSEVFLTKIEQENFLRKQRTFDNGVIPHQIHLTELRAIIANQKKHYPFLKEEQEKLESLLTFKIPYYVGPLAKKQENSPFAWLIRKSEEKIKPWNLPEIVDMEGSAVRFIERMINTDMYIPHNKVLPKNSLLYQKFSIYNELTKVRYQDERGQMNYFSSIEKKEIFHELFEKNRKVTKKDLQEFLYLKYDIKHAELSGIEKAFNASYTTYHDFLTMSENKREMKQWLEDPELASMFEEIIKTLTVFEDREMIKTRLSHHEATLGKHIIKKLTKKHYTGWGRLSKELIQGIRDKQSNKTILDYLINDDDFPHHRNRNCMQLINDDSLSFKKEIKKAQMITDTENLEEIVKELTGSPAIKKGILQSLKIVDEIVGIMGYEPANIVVEMARENQTTGRGLKSSRPRLKALEESLKDFGSQLLKEYPTDNSSLQKDRLYLYYLQNGRDMYTGAPLDIHRLSDYDIDHIIPRSFTTDNSIDNKVLVSSKENRLKKDDVPSEKVVKKMRSFWYDLYSSKLISKRKLDNLTKIKLTEEDKAGFIKRQLVETRQITKHVAGILHHRFNKAEDTNEPIRKVRIITLKSALVSQFRNRFGIYKVREINEYHHAHDAYLNGVVALALLKKYPQLAPEFVYGEYLKFNAHKANKATVKKEFYSNIMKFFESDTPVCDENGEIFWDKSKSIAQVKKVINHHHMNIVKKTEIQKGGFSKETVEPKKDSSKLLPRKNNWDPTKYGGLGSPNVAYTVAFTYEKGKARKRTNALEGITIMEREAFEQSPVLFLKNKGYEQAEIEMKLPKYALFELENGRKRMVASNKEAQKANSFLLPEHLVTLLYHAKQYDEISHKESFDYVNEHHKEFSEVFARVLEFAGKYTLAEKNIEKLEKIYKENQTDDLAKLASSFVNLMQFNAMGAPADFKFFDVTIPRKRYTSLTEIWQSTIIHQSITGLYETRIRMGK

SEQ ID NO: 204 - protein, 1340 aa, Enterococcus faecium
  Enterococcus faecium PC4.1
MKKEYTIGLDIGTNSVGWSVLTDDYRLVSKKMKVAGNTEKSSTKKNFWGVRLFDEGQTAEARRSKRTARRRLARRRQRILELQKIFAPEILKIDEHFFARLNESFLVLDEKKQSRHPVFATIKQEKSYHQTYPTIYHLRQALADSSEKADIRLVYLAMAHLLKYRGHFLIEGELNTENSSVTETFRQFLSTYNQQFSEADDKQTEKLDEAVDCSFVFTEKMSKTKKAETLLKYFPHEKSNGYLSQFIKLMVGNQGNFKNVFGLEEEAKLQFSKETYEEDLEELLEKIGDDYIDLFVQAKNVYDAVLLSEILSDSTKNTRAKLSAGMIRRYDAHKEDLVLLKRFVKENLPKKYRAFFGDNSVNGYAGYIEGHATQEDFYKFVKKELTGIRGSEVFLTKIEQENFLRKQRTFDNGVIPHQIHLTELRAIIANQKKHYPFLKEEQEKLESLLTFKIPYYVGPLAKKQENSPFAWLIRKSEEKIKPWNLPEIVDMEGSAVRFIERMINTDMYIPHNKVLPKNSLLYQKFSIYNELTKVRYQDERGQMNYFSSIEKKEIFHELFEKNRKVTKKDLQEFLYLKYDIKHAELSGIEKAFNASYTTYHDFLTMSENKREMKQWLEDPELASMFEEIIKTLTVFEDREMIKTRLSHHEATLGKHIIKKLTKKHYTGWGRLSKELIQGIRDKQSNKTILDYLINDDDFPHHRNRNFMQLINDDSLSFKKEIKKAQMITDTENLEEIVKELTGSPAIKKGILQSLKIVDEIVGIMGYEPANIVVEMARENQTTGRGLKSSRPRLKALEESLKDFGSQLLKEYPTDNSSLQKDRLYLYYLQNGRDMYTGAPLDIHRLSDYDIDHIIPRSFTTDNSIDNKVLVSSKENRLKKDDVPSEKVVKKMRSFWYDLYSSKLISKRKLDNLTKIKLTEEDKAGFIKRQLVETRQITKHVAGILHHRFNKAEDTNEPIRKVRIITLKSALVSQFRNRFGIYKVREINEYHHAHDAYLNGVVALALLKKYPQLAPEFVYGEYLKFNAHKANKATVKKEFYSNIMKFFESDTPVCDENGEIFWDKSKSIAQVKKVINHHHMNIVKKTEIQKGGFSKETVEPKKDSSKLLPRKNNWDPAKYGGLGSPNVAYTVAFTYEKGKARKRTNALEGITIMEREAFEQSPVLFLKNKGYEQAEIEMKLPKYALFELENGRKRMVASNKEAQKANSFLLPEHLVTLLYHAKQYDEISHKESFDYVNEHHKEFSEVFARVLEFAGKYTLAEKNIEKLEKIYKENQTDDLAKLASSFVNLMQFNAMGAPADFKFFDVTIPRKRYTSLTEIWQSTIIHQSITGLYETRIRMGK

SEQ ID NO: 205 - protein, 1340 aa, Enterococcus faecium
  Enterococcus faecium TX1330
MKKEYTIGLDIGTNSVGWSVLTDDYRLVSKKMKVAGNTEKSSTKKNFWGVRLFDEGQTAEARRSKRTARRRLARRRQRILELQKIFAPEILKIDEHFFARLNESFLVLDEKKQSRHPVFATIKQEKSYHQTYPTIYHLRQALADSSEKADIRLVYLAMAHLLKYRGHFLIEGELNTENSSVTETFRQFLSTYNQQFSEADDKQTEKLDEAVDCSFVFTEKMSKTKKAETLLKYFPHEKSNGYLSQFIKLMVGNQGNFKNVFGLEEEAKLQFSKETYEEDLEELLEKIGDDYIDLFVQAKNVYDAVLLSEILSDSTKNTRAKLSAGMIRRYDAHKEDLVLLKRFVKENLPKKYRAFFGDNSVNGYAGYIEGHATQEDFYKFVKKELTGIRGSEVFLTKIEQENFLRKQRTFDNGVIPHQIHLTELRAIIANQKKHYPFLKEEQEKLESLLTFKIPYYVGPLAKKQENSPFAWLIRKSEEKIKPWNLPEIVDMEGSAVRFIERMNNTDMYIPHNKVLPKNSLLYQKFSIYNELTKVRYQDERGQMNYFSSIEKKEIFHELFEKNRKVTKKDLQEFLYLKYDIKHAELSGIEKAFNASYTTYHDFLTMSENKREMKQWLEDPELASMFEEIIKTLTVFEDREMIKTRLSHHEATLGKHIIKKLTKKHYTGWGRLSKELIQGIRDKQSNKTILDYLINDDDFPHHRNRNFMQLINDDSLSFKKEIKKAQMITDTENLEEIVKELTGSPAIKKGILQSLKIVDEIVGIMGYEPANIVVEMARENQTTGRGLKSSRPRLKALEESLKDFGSQLLKEYPTDNSSLQKDRLYLYYLQNGRDMYTGAPLDIHRLSDYDIDHIIPRSFTTDNSIDNKVLVSSKENRLKKDDVPSEKVVKKMRSFWYDLYSSKLISKRKLDNLTKIKLTEEDKAGFIKRQLVETRQITKHVAGILHHRFNKAEDTNEPIRKVRIITLKSALVSQFRNRFGIYKVREINEYHHAHDAYLNGVVALALLKKYPQLAPEFVYGEYLKFNAHKANKATVKKEFYSNIMKFFESDTPVCDENGEIFWDKSKSIAQVKKVINHHHMNIVKKTEIQKGGFSKETVEPKKDSSKLLPRKNNWDPAKYGGLGSPNVAYTVAFTYEKGKARKRTNALEGITIMEREAFEQSPVLFLKNKGYEQAEIEMKLPKYALFELENGRKRMVASNKEAQKANSFLLPEHLVTLLYHAKQYDEISHKESFDYVNEHHKEFSEVFARVLEFAGKYTLAEKNIEKLEKIYKENQTDDLAKLASSFVNLMQFNAMGAPADFKFFDVTIPRKRYTSLTEIWQSTIIHQSITGLYETRIRMGK

SEQ ID NO: 206 - protein, 1340 aa, Enterococcus faecium
  Enterococcus faecium TX1337RF
MKKEYTIGLDIGTNSVGWSVLTDDYRLVSKKMKVAGNTEKSSTKKNFWGVRLFDEGQTAEARRSKRTARRRLARRRQRILELQKIFAPEILKIDEHFFARLNESFLVLDEKKQSRHPVFATIKQEKSYHQTYPTIYHLRQALADSSEKADIRLVYLAMAHLLKYRGHFLIEGELNTENSSVTETFRQFLSTYNQQFSEADDKQTEKLDEAVDCSFVFTEKMSKTKKAETLLKYFPHEKSNGYLSQFIKLMVGNQGNFKNVFGLEEEAKLQFSKETYEEDLEELLEKIGDDYIDLFVQAKNVYDAVLLSEILSDSTKNTRAKLSAGMIRRYDAHKEDLVLLKRFVKENLPKKYRAFFGDNSVNGYAGYIEGHATQEDFYKFVKKELTGIRGSEVFLTKIEQENFLRKQRTFDNGVIPHQIHLTELRAIIANQKKHYPFLKEEQEKLESLLTFKIPYYVGPLAKKQENSPFAWLIRKSEEKIKPWNLPEIVDMEGSAVRFIERMINTDMYMPHNKVLPKNSLLYQKFSIYNELTKVRYQDERGQMNYFSSIEKKEIFHELFEKNRKVTKKDLQEFLYLKYDIKHAELSGIEKAFNASYTTYHDFLTMSENKREMKQWLEDPELASMFEEIIKTLTVFEDREMIKTRLSHHEATLGKHIIKKLTKKHYTGWGRLSKELIQGIRDKQSNKTILDYLINDDDFPHHRNRNFMQLINDDSLSFKKEIKKAQMITDTENLEEIVKELTGSPAIKKGILQSLKIVDEIVGIMGYEPANIVVEMARENQTTGRGLKSSRPRLKALEESLKDFGSQLLKEYPTDNSSLQKDRLYLYYLQNGRDMYTGAPLDIHRLSDYDIDHIIPRSFTTDNSIDNKVLVSSKENRLKKDDVPSEKVVKKMRSFWYDLYSSKLISKRKLDNLTKIKLTEEDKAGFIKRQLVETRQITKHVAGILHHRFNKAEDTNEPIRKVRIITLKSALVSQFRNRFGIYKVREINEYHHAHDAYLNGVVALALLKKYPQLAPEFVYGEYLKFNAHKANKATVKKEFYSNIMKFFESDTPVCDENGEIFWDKSKSIAQVKKVINHHHMNIVKKTEIQKGGFSKETVEPKKDSSKLLPRKNNWDPAKYGGLGSPNVAYTVAFTYEKGKARKRTNALEGITIMEREAFEQSPVLFLKNKGYEQAEIEMKLPKYALFELENGRKRMVASNKEAQKANSFLLPEHLVTLLYHAKQYDEISHKESFDYVNEHHKEFSEVFARVLEFAGKYTLAEKNIEKLEKIYKENQTDDLAKLASSFVNLMQFNAMGAPADFKFFDVTIPRKRYTSLTEIWQSTIIHQSITGLYETRIRMGK

SEQ ID NO: 207 - protein, 1336 aa, Enterococcus hirae
MTKDYTIGLDIGTNSVGWAVLTDDYQLMKRKMSVHGNTEKKKIKKNFWGARLFDEGQTAEFRRTKRTNRRRLARRKYRLSKLQDLFAEELCKQDDCFFVRLEESFLVPEEKQYKPASIFPTLEEEKEYYQKYPTIYHLRQKLVDSTEKEDLRLVYLALAHLLKYRGHFLFEGDLDTENTSIEESFRVFLEQYSKQSDQPLIVHQPVLTILTDKLSKTKKVEEILKYYPTEKINSFFAQCLKLIVGNQANFKRIFDLEAEVKLQFSKETYEEDLESLLEKIGDEYLDIFLQAKKVHDAILLSEIISSTVKHTKAKLSSGMVERYERHKADLAKFKQFVKENVPQKATVFFKDTTKNGYAGYIKGKTTQEEFYKFVKKELSGVVGSEPFLEKIDQETFLLKQRTYTNGVIPHQVHLIELKAIIDQQKQHYPFLEEAGPKIIALFKFRIPYYVGPLAKEQEASSFAWIERKTAEKINPWNFSEVVDIEKSAMRFIQRMTKQDTYLPTEKVLPKNSLLYQKYMIFNELTKVSYKDERGVKQYFSGDEKQQIFKQLFQKERGKITVKKLQNFLYTHYHIENAQIFGIEKAFNASYSTYHDFMKLAKTNQKAMQEWLEQPEMEPIFEDIVKILTIFEDRQMIKHQLSKYQEVFGEKLLKEFARKHYTGWGRFSAKLIHGIRDRKTNKTILDYLINDDDVPANRNRNLMQLINDEHLSFKEEIAKATVFSKHKSLVDVIQDLPGSPAIKKGIWQSLKIVEELIAIIGYKPKNIVIEMARENQKTHRTSPRLKALENGLKQIGSTLLKEQPTDNKALQKERLYLYYLQNGRDMYTGEPLEIENLHQYEVDHIIPRSFIVDNSIDNKVLVASKQNQKKRDDVPKKQIVNEQRIFWNQLKEAKLISPKKYAYLTKIELTPEDKARFIQRQLVETRQITKHVANILHQSFNQEEEGTDCDGVQIITLKATLTSQFRQTFGLYKVREINPHHHAHDAYLNGFIANVLLKRYPKLAPEFVYGKYVKYSLARENKATAKKEFYSNILKFLESDEPFCDENGEIYWEKSHHLPRIKKVLSSHQVNVVKKVEQQKGGFYKETVNSKEKPDKLIERKNNWDVTKYGGFGSPVIAYAIAFVYAKGKTQKKTRAIEGITIMEQAAFEKDPTTFLKEKGFPQVTEFIKLPKYTLFEFDNGRRRFLASHKESQKGNPFILSDQLVTLLYHAQHYDKITYQESFDYVNTHLSDFSAILTEVLAFAEKYTLADKNIERIQELYEENKYGETSMIAQSFLQLLQFNAIGAPADFKFFGVTIPRKRYTSLTEIWDATIIYQSVTGLYETRIRMGDLWAGEQ

SEQ ID NO: 208 - protein, 1330 aa, Enterococcus italicus
  Enterococcus italicus DSM 15952
MKNDYTIGLDIGTNSVGYSVVTDDYKVISKKMNVFGNTEKKSIKKNFWGVRLFESGQTAQEARMKRTSRRRIARRKNRICYLQEIFQPEMNHLDNNFFYRLNESFLVADDAKYDKHPIFGTLDEEIHFHEQFPTIYHLRKYLADGDEKADLRLVYLAIAHIIKFRGNFLIEGELNTENNSVIELSKVFVQLYNQTLSELEGFQFIDESIDFSEVLTQQLSKSERADNVLKLFPDEKGTGIFAQFIKLIVGNQGNFKKVFQLEEDQKLQLSTDDYEENIENLLAIIGDEYGDIFVAAQNLYQAILLAGILTSTEKTRAKLSASMIQRYEEHAKDLKLLKRFVKEHIPDKYAEIFNDATKNGYAGYIDGKTKEEEFYKYLKTTLVQKSGYQYFIEKIEQENFLRKQRIYDNGVIPHQVHAEELRAILRKQEKYYSFLKENHEKIEQIFKVRIPYYVGPLAKHNEQSRFAWNIRKSDEPIRPWNMNDVVDENASAVAFIERMTIKDIYLNENVLPRHSLIYEKFTVFNELTKVLYADDRGVFQRFSAEEKEDIFEKLFKSERKVTKKKLENYLRIELSISSPSVKGIEEQFNANFGTYLDLKKFDELHPYLDDEKYQDTLEEVIKVLTVFEDRSMIQNQLEQLPLNLSTKTIKALSRRKYTGWGRLSARLIDGIHDKNSGKTILDYLIEDESDSYIVNRNFMQLINDDHLSFKKIIEDSQPYKEQQSAEEIVSELSGSPAIKKGILQSLKIVDELVAIMGYKPKNIVVEMARENQTTGRGKQNSKPRLKGIENGLKEFSDSVLKGSSIDNKQLQNDRLYLYYLQNGKDMYTGHELDIDHLSTYDIDHIIPQSFLTDNSIDNRVLTTSKSNRGKSDNVPSEEVVRKMDRFWRKLLNAKLISERKYTNLTKKELTESDKAGFLKRQLVETRQITKHVATILDSKFNEDSNNRDVQIITLKSALVSEFRKTFNLYKVREINDLHHAHDAYLNAVVALSLLRVYPQLKPEFVYGEYGKNSIHDQNKATIKKQFYSNITRYFASKDYIINDDGEILWNKQETIAQVIKTLGMHQVNVVKKVEIQKGGFSKESIQPKGESQKLIRRKQQWNTKKYGGFDSPVVAYAILLSFDKGKRKARSFKIVGITIQDRESFEGNPILYLSKKDYHNPKVEAILPKYSLFEFENGRRRMVASASETQKGNQLIIPGHLMELLYHSKKIINGKNSDSVSYIQNNKEKFREIFEYIVDFSSKYISADANLNKIEKIFENNFHKASEQEIAKSFINLLTFTAMGAPADFEFFGEKIPRKRYVSISEIIDAVFIHQSITGLYETRVRLTEV

SEQ ID NO: 209 - protein, 1096 aa, Eubacterium dolichum
  Eubacterium dolichum DSM 3991
MMEVFMGRLVLGLDIGITSVGFGIIDLDESEIVDYGVRLFKEGTAAENETRRTKRGGRRLKRRRVTRREDMLHLLKQAGIISTSFHPLNNPYDVRVKGLNERLNGEELATALLHLCKHRGSSVETIEDDEAKAKEAGETKKVLSMNDQLLKSGKYVCEIQKERLRTNGHIRGHENNFKTRAYVDEAFQILSHQDLSNELKSAIITIISRKRMYYDGPGGPLSPTPYGRYTYFGQKEPIDLIEKMRGKCSLFPNEPRAPKLAYSAELFNLLNDLNNLSIEGEKLTSEQKAMILKIVHEKGKITPKQLAKEVGVSLEQIRGFRIDTKGSPLLSELTGYKMIREVLEKSNDEHLEDHVFYDEIAEILTKTKDIEGRKKQISELSSDLNEESVHQLAGLTKFTAYHSLSFKALRLINEEMLKTELNQMQSITLFGLKQNNELSVKGMKNIQADDTAILSPVAKRAQRETFKVVNRLREIYGEFDSIVVEMAREKNSEEQRKAIRERQKFFEMRNKQVADIIGDDRKINAKLREKLVLYQEQDGKTAYSLEPIDLKLLIDDPNAYEVDHIIPISISLDDSITNKVLVTHRENQEKGNLTPISAFVKGRFTKGSLAQYKAYCLKLKEKNIKTNKGYRKKVEQYLLNENDIYKYDIQKEFINRNLVDTSYASRVVLNTLTTYFKQNEIPTKVFTVKGSLTNAFRRKINLKKDRDEDYGHHAIDALIIASMPKMRLLSTIFSRYKIEDIYDESTGEVFSSGDDSMYYDDRYFAFIASLKAIKVRKFSHKIDTKPNRSVADETIYSTRVIDGKEKVVKKYKDIYDPKFTALAEDILNNAYQEKYLMALHDPQTFDQIVKVVNYYFEEMSKSEKYFTKDKKGRIKISGMNPLSLYRDEHGMLKKYSKKGDGPAITQMKYFDGVLGNHIDISAHYQVRDKKVVLQQISPYRTDFYYSKENGYKFVTIRYKDVRWSEKKKKYVIDQQDYAMKKAEKKIDDTYEFQFSMHRDELIGITKAEGEALIYPDETWHNFNFFFHAGETPEILKFTATNNDKSNKIEVKPIHCYCKMRLMPTISKKIVRIDKYATDVVGNLYKVKKNTLKFEFD

SEQ ID NO: 210 - protein, 1114 aa, Eubacterium rectale
MNYTEKEKLFMKYILALDIGIASVGWAILDKESETVIEAGSNIFPEASAADNQLRRDMRGAKRNNRRLKTRINDFIKLWENNNLSIPQFKSTEIVGLKVRAITEEITLDELYLILYSYLKHRGISYLEDALDDTVSGSSAYANGLKLNAKELETHYPCEIQQERLNTIGKYRGQSQIINENGEVLDLSNVFTIGAYRKEIQRVFEIQKKYHPELTDEFCDGYMLIFNRKRKYYEGPGNEKSRTDYGRFTTKLDANGNYITEDNIFEKLIGKCSVYPDELRAAAASYTAQEYNVLNDLNNLTINGRKLEENEKHEIVERIKSSNTINMRKIISDCMGENIDDFAGARIDKSGKEIFHKFEVYNKMRKALLEIGIDISNYSREELDEIGYIMTINTDKEAMMEAFQKSWIDLSDDVKQCLINMRKTNGALFNKWQSFSLKIMNELIPEMYAQPKEQMTLLTEMGVTKGTQEEFAGLKYIPVDVVSEDIFNPVVRRSVRISFKILNAVLKKYKALDTIVIEMPRDRNSEEQKKRINDSQKLNEKEMEYIEKKLAVTYGIKLSPSDFSSQKQLSLKLKLWNEQDGICLYSGKTIDPNDIINNPQLFEIDHIIPRSISFDDARSNKVLVYRSENQKKGNQTPYYYLTHSHSEWSFEQYKATVMNLSKKKEYAISRKKIQNLLYSEDITKMDVLKGFINRNINDTSYASRLVLNTIQNFFMANEADTKVKVIKGSYTHQMRCNLKLDKNRDESYSHHAVDAMLIGYSELGYEAYHKLQGEFIDFETGEILRKDMWDENMSDEVYADYLYGKKWANIRNEVVKAEKNVKYWHYVMRKSNRGLCNQTIRGTREYDGKQYKINKLDIRTKEGIKVFAKLAFSKKDSDRERLLVYLNDRRTFDDLCKIYEDYSDAANPFVQYEKETGDIIRKYSKKHNGPRIDKLKYKDGEVGACIDISHKYGFEKGSKKVILESLVPYRMDVYYKEENHSYYLVGVKQSDIKFEKGRNVIDEEAYARILVNEKMIQPGQSRADLENLGFKFKLSFYKNDIIEYEKDGKIYTERLVSRTMPKQRNYIETKPIDKAKFEKQNLVGLGKTKFIKKYRYDILGNKYSCSEEKFTSFC

SEQ ID NO: 211 - protein, 1391 aa, Eubacterium sp.
  Eubacterium sp. AS15
MENKQYYIGLDVGTNSVGWAVTDTSYNLLRAKGKDMWGARLFDEAKTAVERRTKRTSRRRSEREKARKAMLKELFADEINKVDPNFFIRLEESKFFLDDRSENNRQRYTLFNDAKFTDKDYYEKYKTIFHLRSALINSDEKFDVRLVFLAILNLFSHRGHFLNASLKGDGEIQGVDIFYNDLYEVCEEFEIDLPQISNIDNFEKILSQKGKSRTKILEELSEELSISKKEKIKYSLLKLICGMKIKVVDIYADEDIQEDDKKKDLGFRESDYEKSSLEVKEIIGDDHFELIERAKAVHDIGLLANIIGNSKYLCEARVEAYDNHHKDLQKIKELLKKYDIKAYTDMFRKMTDKNYSAYVGSVNSNIAKERRSVDNRKIEDLYEYIKKIALKNISDDNEDKIEILKKIETGEFLKKQLTASNGVIPNQLQSRELRAILKKAENYLPFLKEKGEKNLTVSEMIIQLFEFQIPYYVGPLDKNPKKDKNANSWAVIPSGGRILPWNFEDKVDVKGSRKEFIEKMVRKCTYLSEEHTLPKQSLLYEKFMVLNEINNIKIDGEKISVEAKQKIYNDLFMKGKKVSQKAIKQELISLNIMSKDSVLSGIDTVCNAYLSSIAKFRGVFDENVNNQSTIDMIEDIIFLKTVYSDEKRFVKEEIVEKYGDEIDKDKIKRILGFKFSNWGNISKSFLELEGADVGTGEIRSIIQSLWETNFNLMELLSSRFTYMDELEKRVKKLEKPLSEWTIEDLDDMYLSSPVKRMIWQSMKIVDEIQTVIGYAPKRIFVEMTRSEGEKVRTKSRKDRLKELYSAIKEDSKQWVKELDAKDESYFRSKKMYLYYLQKGRCMYSGEVIELDKLMDDNLYDIDHIYPRSFVKDDSLDNLVLVKKEINNRKQNDPITPQIQASCQGFWKVLHEQGFISNEKYSRLTRKTQEFSDEEKLSFINRQIVETGQATKCMAQILQKSMGEDVDVVFSKARLVSEFRHKFELFKSRLINDFHHANDAYLNIVVGNSYFVKFTRNPANFIKDARKNPDNPAYKYHMDRFFERDVKSKSEVAWIGQSEGNAGTIAIVKKTMSKNSPLITKKVEEGHGSITKETIVGVKEIKFGRNKVEKADKTPKKANLQAYRPIKTSDERLCNILRYGGRTSISISGYCLVEYVKKRKTIRSLEAIPVYLGRKDSLSEEKLLNYFRYNLNDGGKDSVSDIRLCLPFISTNSLVKIDGYLYYLGGKNDDRIQLYNAYQLKMKKEEVEYIRKIEKAVSMSKFDEIDREKNPVLTEEKNIELYNKIQDKFENTVFSKRMSLVKYNKKDLSFGDFLKNKKSKFEEIDLEKQCKVLYNIIFNLSNLKEVDLSDIGGSKSTGKCRCKKNITNYKEFKLIQQSITGLYSCEKDLMTI

SEQ ID NO: 212 - protein, 1107 aa, Eubacterium ventriosum
  Eubacterium ventriosum ATCC 27560
MGYTVGLDIGVASVGVAVLDENDNIVEAVSNIFDEADTSNNKVRRTLREGRRTKRRQKTRIEDFKQLWETSGYIIPHKLHLNIIELRNKGLTELLSLDELYCVLLSMLKHRGISYLEDADDGEKGNAYKKGLAFNEKQLKEKMPCEIQLERMKKYGKYHGEFIIEINDEKEYQSNVFTTKAYKKELEKIFETQRCNGNKINTKFIKKYMEIYERKREYYIGPGNEKSRTDYGIYTTRTDEEGNFIDEKNIFGKLIGKCSVYPEEYRASSASYTAQEFNLLNDLNNLKINNEKLTEFQKKEIVEIIKDASSVNMRKIIKKVIDEDIEQYSGARIDKKGKEIYHTFEIYRKLKKELKTINVDIDSFTREELDKTMDILTLNTERESIVKAFDEQKFVYEENLIKKLIEFRKNNQRLFSGWHSFSYKAMLQLIPVMYKEPKEQMQLLTEMNVFKSKKEKYVNYKYIPENEVVKEIYNPVVVKSIRTTVKILNALIKKYGYPESVVIEMPRDKNSDDEKEKIDMNQKKNQEEYEKILNKIYDEKGIEITNKDYKKQKKLVLKLKLWNEQEGLCLYSGKKIAIEDLLNHPEFFEIDHIIPKSISLDDSRSNKVLVYKTENSIKENDTPYHYLTRINGKWGFDEYKANVLELRRRGKIDDKKVNNLLCMEDITKIDVVKGFINRNLNDTRYASRVVLNEMQSFFESRKYCNTKVKVIRGSLTYQMRQDLHLKKNREESYSHHAVDAMLIAFSQKGYEAYRKIQKDCYDFETGEILDKEKWNKYIDDDEFDDILYKERMNEIRKKIIEAEEKVKYNYKIDKKCNRGLCNQTIYGTREKDGKIHKISSYNIYDDKECNSLKKMINSGKGSDLLMYNNDPKTYRDMLKILETYSSEKNPFVAYNKETGDYFRKYSKNHNGPKVEKVKYYSGQINSCIDISHKYGHAKNSKKVVLVSLNPYRTDVYYDNDTGKYYLVGVKYNHIKCVGNKYVIDSETYNELLRKEGVLNSDENLEDLNSKNITYKFSLYKNDIIQYEKGGEYYTERFLSRIKEQKNLIETKPINKPNFQRKNKKGEWENTRNQIALAKTKYVGKLVTDVLGNCYIVNMEKFSLVVDK

SEQ ID NO: 213 - protein, 1391 aa, Eubacterium yurii
  Eubacterium yurii subsp. margaretiae ATCC 43715
MENKQYYIGLDVGTNSVGWAVTDTSYNLLRAKGKDMWGARLFEKANTAAERRTKRTSRRRSEREKARKAMLKELFADEINRVDPSFFIRLEESKFFLDDRSENNRQRYTLFNDATFTDKDYYEKYKTIFHLRSALINSDEKFDVRLVFLAILNLFSHRGHFLNASLKGDGDIQGMDVFYNDLVESCEYFEIELPRITNIDNFEKILSQKGKSRTKILEELSEELSISKKDKSKYNLIKLISGLEASVVELYNIEDIQDENKKIKIGFRESDYEESSLKVKEIIGDEYFDLVERAKSVHDMGLLSNIIGNSKYLCEARVEAYENHHKDLLKIKELLKKYDKKAYNDMFRKMTDKNYSAYVGSVNSNIAKERRSVDKRKIEDLYKYIEDTALKNIPDDNKDKIEILEKIKLGEFLKKQLTASNGVIPNQLQSRELRAILKKAENYLPFLKEKGEKNLTVSEMIIQLFEFQIPYYVGPLDKNPKKDNKANSWAKIKQGGRILPWNFEDKVDVKGSRKEFIEKMVRKCTYISDEHTLPKQSLLYEKFMVLNEINNIKIDGEKISVEAKQKIYNDLFVKGKKVSQKDIKKELISLNIMDKDSVLSGTDTVCNAYLSSIGKFTGVFKEEINKQSIVDMIEDIIFLKTVYGDEKRFVKEEIVEKYGDEIDKDKIKRILGFKFSNWGNLSKSFLELEGADVGTGEVRSIIQSLWETNFNLMELLSSRFTYMDELEKRVKKLEKPLSEWTIEDLDDMYLSSPVKRMIWQSMKIVDEIQTVIGYAPKRIFVEMTRSEGEKVRTKSRKDRLKELYNGIKEDSKQWVKELDSKDESYFRSKKMYLYYLQKGRCMYSGEVIELDKLMDDNLYDIDHIYPRSFVKDDSLDNLVLVKKEINNRKQNDPITPQIQASCQGFWKILHDQGFMSNEKYSRLTRKTQEFSDEEKLSFINRQIVETGQATKCMAQILQKSMGEDVDVVFSKARLVSEFRHKFELFKSRLINDFHHANDAYLNIVVGNSYFVKFTRNPANFIKDARKNPDNPVYKYHMDRFFERDVKSKSEVAWIGQSEGNSGTIVIVKKTMAKNSPLITKKVEEGHGSITKETIVGVKEIKFGRNKVEKADKTPKKPNLQAYRPIKTSDERLCNILRYGGRTSISISGYCLVEYVKKRKTIRSLEAIPVYLGRKDSLSEEKLLNYFRYNLNDGGKDSVSDIRLCLPFISTNSLVKIDGYLYYLGGKNDDRIQLYNAYQLKMKKEEVEYIRKIEKAVSMSKFDEIDREKNPVLTEEKNIELYNKIQDKFENTVFSKRMSLVKYNKKDLSFGDFLKNKKSKFEEIDLEKQCKVLYNIIFNLSNLKEVDLSDIGGSKSTGKCRCKKNITNYKEFKLIQQSITGLYSCEKDLMTI

SEQ ID NO: 214 - protein, 1142 aa, Facklamia hominis
  Facklamia hominis CCUG 36813
MYSVGLDIGIASCGYSIINDVNGNIVELGTLLFKSRNSDNNEERRTNRGSRRLINRRRTRLDDGKKLLAEKGFKQDSKLKHVCPYELRVKGLHEKLTQGEIYKVVLHILKKRGISYLDESDENSSGIDGASYKDQVNLNLNLQKELTPGQIQLKRLKENGRIKSGVTFENGYQLNVFSVSAYANELNKILTKQSEYYSEIDQIWIDRFTKNGYRKEAGLVYRKRPYYDGPGNEKNNSIYGRWANFKEDGHPKENIFDQLIGLDSVDSTQVRASASTLTAQKYNLLNDLNNLTIIEDDRKFTTDEKVSIINYLMTQDITRFGPKELAKFYQLEVDQIRGWRIDNKGNPEIHSLKVYRDWKKIFNTSSIDLTSIQTWVVDELANVITLNTEIPSTLATLKIKIPDIDQQILNFVENNFYELKKKTSKNSWHSFSLKTLNILIPELLNTSEEQNTILERLNLKFDLKNKYAEKNQIPVKELLEQIYNPTVTKSVHQSIKLFNEIIEKYGKNNISYVTIEMPRDKNDQDQKDTIKRINKLNSERKNDSEKYFLERSGWDTIRFESALKKPRFAEKLLFYYEQKGKCAYSGQDILAESLLNESCEVDHIIPLSISFDDSIHNKVLVTASSNQEKGQRTPYMAFIDGAKLGQSWDDFVAWVNSCGFHRKKVQNLLYEENIFNPDVQRGFVSRNLNDTRYASRIVLNAIQSFFYKQKDLTKVKVVNGSFTHTLRKKWGSSLDKNRDTYHHHAVDATLCAVTPFINIVKYEFFEEDGIKYMVDLTTGEKVAYSDYKKMKFYDKRAYVPIWDGFIKQLTPANLYPKIKFSHQVDSKWNRKISDATIYSTRKIVETKINKKGVAKETVKDIVIDKIKDIYTPEGWRKFKEKQDKLLMKNFDEKTYNKLIKIAKEYPEKKEVQTSNGKVSLVEVSPFKMYCEEQNVPAIRKYSKKGNGPYIRSLKFYDKELGKHINITKDSYGNDIERTIRNKKIILKNQNSWRTDVYYNSVNNCYELLGIKYCHLKFYRGKYGIPKSIYDELKKEDEISSESVFKFSLYRHDRVRFEKDGEYIEALFGSKNESNKNYLELSPIDKNKWLSKENVKFFGEVAASGRFIKGLKPGIKVIKQSTDYMGHVYAIHQEKLKFVLSDA

SEQ ID NO: 215 - protein, 1512 aa, Fibrobacter succinogenes
MKKILGLDLGTNSIGWAVVNADEITRDDGSRYLKPNGISAAGSRIIPMSADILGDFEKGNSISQTAERTRMRMARRLHERALLRRERLLRVLNLLDFLPKHFADKIDRYGKFTDDSEPKLAWRKNTEGKYEFIFQDAFNEMLAEFKDKQPEIVEEGKKIPYDWTIYYLRKKALEKALSKEELSWILLQFNQKRGYYQLRGEEEEIPQDKKIEYLAQKVVKVEATDQKKGDDVWYNVYLENGMIYRRTSKAPLDWEGKVKEFIVTTEVENDGETPKKDKEGNIKRSFRAPKEDDWTLLKKKTEADIENSHKTVGCYIYDSLLNNPKQKIIGKLVRTVERKFYKEELTQILKKQVELIPELRDDNLYKQCIEELYPINEAHRNTIAKTDFANLFINDILFYQRPLKSKKSQIDNCPYEERIFIDSKTGEKKKVPVKCIAKSNPLFQEFRLWQFIQNLRIYQREKEIDGKLLTDIDITSECLKSEEDYVRLFDWLNDRETIEQEDLLKHLFNTKKSKNKENPYRWNYVEDKVYPCNETRATILKGFSKCGINASVLSPELEMALWHILYSVEDKKEIETALTHFAQKQGWNDDFAKVFSKAKPFKKDYGSYSEKAIKKLLSLMRMGKYWNQDNIDKNTLDRIDKIINGEYDEKISNRVRDNAINLKDISDFRGLPVWLACYIVYDRHSEAKDCTKWNSPEEIDSYLKKFKQHSLRNPIVEQVVTETLRTVRDIWIQEEQIDEIHLELGRDLKNPADKRKKMSENILKNENTNLRIKAMLMEFMNPSMGIENVRPYSPSQQDILRIYEENALDNLTKDDKDFDFISKISKQAQPSKTDIIRYKCWLEQKYRSPYTGKTISLSKLFTPAYEIEHVIPQSLYFDDSFSNKVICEAEVNKLKDRQLGYKFIAEHHGEKVQLSQGEVVEILSVDAYEKFVKENYANNRIKMKKLLMESIPDEFIERQLNDSRYISKVVKGLLSNIVREKIDDENYEPEAVSKNLISCNGAITDRLKKDWGMNDVWNSIILPRFIRMNQITGKDCFTTTNAEGHLIPQMPLELQKGFNKKRIDHRHHAMDAIVIACTTRDHVNLLNNEAAHSKFNATRYQLQRKLRRFEKAVIDGKEREVAKEFLKPWDSFSSDSKNILENIIVSFKQNQRVINKTTNAFLHFDENGKKTFIKQGKGDSWAIRKSMHKDTVFGEINLRKVRSVSLNEAIKVPERVLNKKIKEKILELKNNKIDAKNIKKYIEENHTGGYGIDSSKIDVFYFTKETKERFFATRKTLDTSFNQAKIKDSIADSGIQKILLAHLKSKNGDAEQAFSPDGIDEMNKNIVELNNGKFHQPILKVRVYEKADKFAVGQKGNKKVKFVEAAKGTNLFFAIFEKDGKRSYLTIPLNVMIDCQKQYGNQWKNNIEAYLKEKELVEKDVKLQFILSPNDLVYLPTEGSIDKKRIYKVVSFTNNRLYAIPYAIAKSIVDKNEFTQLNKIEFTDNKESIKDACVPVIIDRLGNVIEFNGKRL

SEQ ID NO: 216 - protein, 1365 aa, Filifactor alocis
MTKEYYLGLDVGTNSVGWAVTDSQYNLCKFKKKDMWGIRLFESANTAKDRRLQRGNRRRLERKKQRIDLLQEIFSPEICKIDPTFFIRLNESRLHLEDKSNDFKYPLFIEKDYSDIEYYKEFPTIFHLRKHLIESEEKQDIRLIYLALHNIIKTRGHFLIDGDLQSAKQLRPILDTFLLSLQEEQNLSVSLSENQKDEYEEILKNRSIAKSEKVKKLKNLFEISDELEKEEKKAQSAVIENFCKFIVGNKGDVCKFLRVSKEELEIDSFSFSEGKYEDDIVKNLEEKVPEKVYLFEQMKAMYDWNILVDILETEEYISFAKVKQYEKHKTNLRLLRDIILKYCTKDEYNRMFNDEKEAGSYTAYVGKLKKNNKKYWIEKKRNPEEFYKSLGKLLDKIEPLKEDLEVLTMMIEECKNHTLLPIQKNKDNGVIPHQVHEVELKKILENAKKYYSFLTETDKDGYSVVQKIESIFRFRIPYYVGPLSTRHQEKGSNVWMVRKPGREDRIYPWNMEEIIDFEKSNENFITRMTNKCTYLIGEDVLPKHSLLYSKYMVLNELNNVKVRGKKLPTSLKQKVFEDLFENKSKVTGKNLLEYLQIQDKDIQIDDLSGFDKDFKTSLKSYLDFKKQIFGEEIEKESIQNMIEDIIKWITIYGNDKEMLKRVIRANYSNQLTEEQMKKITGFQYSGWGNFSKMFLKGISGSDVSTGETFDIITAMWETDNNLMQILSKKFTFMDNVEDFNSGKVGKIDKITYDSTVKEMFLSPENKRAVWQTIQVAEEIKKVMGCEPKKIFIEMARGGEKVKKRTKSRKAQLLELYAACEEDCRELIKEIEDRDERDFNSMKLFLYYTQFGKCMYSGDDIDINELIRGNSKWDRDHIYPQSKIKDDSIDNLVLVNKTYNAKKSNELLSEDIQKKMHSFWLSLLNKKLITKSKYDRLTRKGDFTDEELSGFIARQLVETRQSTKAIADIFKQIYSSEVVYVKSSLVSDFRKKPLNYLKSRRVNDYHHAKDAYLNIVVGNVYNKKFTSNPIQWMKKNRDTNYSLNKVFEHDVVINGEVIWEKCTYHEDTNTYDGGTLDRIRKIVERDNILYTEYAYCEKGELFNATIQNKNGNSTVSLKKGLDVKKYGGYFSANTSYFSLIEFEDKKGDRARHIIGVPIYIANMLEHSPSAFLEYCEQKGYQNVRILVEKIKKNSLLIINGYPLRIRGENEVDTSFKRAIQLKLDQKNYELVRNIEKFLEKYVEKKGNYPIDENRDHITHEKMNQLYEVLLSKMKKFNKKGMADPSDRIEKSKPKFIKLEDLIDKINVINKMLNLLRCDNDTKADLSLIELPKNAGSFVVKKNTIGKSKIILVNQSVTGLYENRREL

SEQ ID NO: 217 - protein, 1347 aa, Finegoldia magna
  Finegoldia magna ACS-171-V-Col3
MKSEKKYYIGLDVGTNSVGWAVTDEFYNILRAKGKDLWGVRLFEKAKTAADTRTFRSGRRRNDRKGMRLQILREIFEDEIKKVDKDFYDRLDESKFWAEDKKVSGKYSLFNDKNFSDKQYFEKFPTIFHLRKYLMEEHGKVDIRYYFLAINQMMKRRGHFLIDGQISHVTDDKPLKEQLILLINDLLKIELEEELMDSIFEILADVNEKRTDKKNNLKELIKGQDFNKQEGNILNSIFESIVTGKAKIKNIISDEDILEKIKEDNKEDFVLTGDSYEENLQYFEEVLQENITLFNTLKSTYDFVILQSILKGKSTLSDAQVERYDEHKKDLEILKKVIKKYDEDGKLFKQVFKEDNGNGYVSYIGYYLNKNKKITAKKKISNIEFTKYVKGILEKQCDCEDEAVKYLLGKIEQENFLLKQISSINSVIPHQIHLFELDKILENLAKNYPSFNNKKEEFTKIEKIRKTFTFRIPYYVGPLNDYHKNNGGNAWIFRNKGEKIRPWNFEKIVDLHKSEEEFIKRMLNQCTYLPEETVLPKSSILYSEYMVLNELNNLRIKGKPLDTDVKLKLIEELFKKKTKVTLKSIRDYMIRNNFADKEDFDNSEKNLEIVSNMKSYIDFNNILGDKFELEMVEDLIEKITIHTGNKTLLKKYIEETYPDLSSSQIQKIINLKYKDWGRLSRKLLDGIKGRNKTDDVNTVINFMRNSSDNLMQIIEGKNYSFNEYIDNLRKKYIPQEISYEVVENLYVSPSVKKMIWQVIRVTEEITKVMGYDPDKIFIEMAKSEEEKKTTISRKNKLLDLYKAIKKDERDSQYEKLLTGLNKLDESELRSKKLYLYYTQMGRDMYTGEKIDLDKLFDSTHYDKDHIIPQSMKKDDSIINNLVLVNKNANQTTKGNIYPVPSSIRNNPDIYNYWKYLMEKEFISKEKYNRLIRNTPLTNEELGVFINRQLVETRQSTKAIKELFEKFYQKSKIIPVKASLASDLRKDMNTLKSREVNDLHHAHDAFLNIVAGDVWNREFTSNPINYVNENREGDKVKYSLSKYFTRPRKSKGKVIWTPEKGRKLIVDTLNKPSVLISNESHVKKGELFNATISGKKDYKKGKIYLPLKKDDRLKDVSKYGGYKAINGAFFFLVEHTKSKKRIRSIELFPLHLLSKFYEDKNTVLDYAINVLQLQDPKIIIDKINYRTEIIIDNFSYLISTKSNDGSITVKPNEQMYWRVDEISNLKKIENKYKKDAILTEEDRKIMESYIDKIYQQFKAGKYKNRRTTDTIIEKYEIIDLDTLDNKQLYQLLVAFISLSYKTSNNAVDFTVIGLGTECGKPRITNLPDNTYLVYKSITGIYEKRIRIK

SEQ ID NO: 218 - protein, 1348 aa, Finegoldia magna
MKSEKKYYIGLDVGTNSVGWAVTDEFYNILRAKGKDLWGVRLFEKADTAANTRIFRSGRRRNDRKGMRLQILREIFEDEIKKVDKDFYDRLDESKFWAEDKKVSGKYSLFNDKNFSDKQYFEKFPTIFHLRKYLMEEHGKVDIRYYFLAINQMMKRRGHFLIDGQISHVTDDKPLKEQLILLINDLLKIELEEELMDSIFEILADVNEKRTDKKNNLKELIKGQDFNKQEGNILNSIFESIVTGKAKIKNIISDEDILEKIKEDNKEDFVLTGDSYEENLQYFEEVLQENITLFNTLKSTYDFLILQSILKGKSTLSDAQVERYDEHKKDLEILKKVIKKYDEDGKLFKQVFKEDNGNGYVSYIGYYLNKNKKITAKKKISNIEFTKYVKGILEKQCDCEDEDVKYLLGKIEQENFLLKQISSINSVIPHQIHLFELDKILENLAKNYPSFNNKKEEFTKIEKIRKTFTFRIPYYVGPLNDYHKNNGGNAWIFRNKGEKIRPWNFEKIVDLHKSEEEFIKRMLNQCTYLPEETVLPKSSILYSEYMVLNELNNLRINGKPLDTDVKLKLIEELFKKKTKVTLKSIRDYMVRNNFADKEDFDNSEKNLEIASNMKSYIDFNNILEDKFDVEMVEDLIEKITIHTGNKKLLKKYIEETYPDLSSSQIQKIINLKYKDWGRLSRKLLDGIKGTKKETEKTDTVINFLRNSSDNLMQIIGSQNYSFNEYIDKLRKKYIPQEISYEVVENLYVSPSVKKMIWQVIRVTEEITKVMGYDPDKIFIEMAKSEEEKKTTISRKNKLLDLYKAIKKDERDSQYEKLLTGLNKLDDSDLRSRKLYLYYTQMGRDMYTGEKIDLDKLFDSTHYDKDHIIPQSMKKDDSIINNLVLVNKNANQTTKGNIYPVPSSIRNNPKIYNYWKYLMEKEFISKEKYNRLIRNTPLTNEELGGFINRQLVETRQSTKAIKELFEKFYQKSKIIPVKASLASDLRKDMNTLKSREVNDLHHAHDAFLNIVAGDVWNREFTSNPINYVKENREGDKVKYSLSKDFTRPRKSKGKVIWTPEKGRKLIVDTLNKPSVLISNESHVKKGELFNATIAGKKDYKKGKIYLPLKKDDRLQDVSKYGGYKAINGAFFFLVEHTKSKKRIRSIELFPLHLLSKFYEDKNTVLDYAINVLQLQDPKIIIDKINYRTEIIIDNFSYLISTKSNDGSITVKPNEQMYWRVDEISNLKKIENKYKKDAILTEEDRKIMESYIDKIYQQFKAGKYKNRRTTDTIIEKYEIIDLDTLDNKQLYQLLVAFISLSYKTSNNAVDFTVIGLGTECGKPRITNLPDNTYLVYKSITGIYEKRIRIK

SEQ ID NO: 219 - protein, 1348 aa, Finegoldia magna
  Finegoldia magna SY403409CC001050417
MKSEKKYYIGLDVGTNSVGWAVTDEFYNILRAKGKDLWGVRLFEKAKTAADTRTFRSGRRRNDRKGVRLQILREIFEDEIKKVDKDFYDRLDESKFWAEDKKVSGKYSLFNDKNFSDKQYFEKFPTIFHLRKYLMEEHGKVDIRYYFLAINQMMKRRGHFLIDGQISHVTDDKPLKQQLILLINDLLKIELEEEFMDSIFEILADVNEKKTEKKNILKELINAQDFNKQEGKILYSIFESIVTGKAKIKNIISDEDILEKIKEDNKEDFVLTGDSYEENLQYFEEVLQENITLFNTLKSAYDFVILQSILKGKSTLSDAQVERYDEHKKDLEILKKVIKKYDEDGKLFKQVFKEDNGNGYVSYIGYYLNKNKKITAKKKISNIEFTKYVKGILEKQCDCEDEDVKYLLGKIEQENFLLKQISSINSVIPHQIHLFELDKILENLAKYYPSFNNKKEEFTKIEKIRKTFTFRIPYYVGPLNDYHKNNGGNAWIFRNKGEKIRPWNFEKIVDLHKSEEEFIKRMLNQCTYLPEETVLPKSSILYSEYMVLNELNNLRINGKPIDTDVKLKLIEELFKKKTKVTLKSIRDYMIRNNFADKEDFDNSEKNLEIVSNMKSYIDFNNILGDKFELEMVEDLIEKITIHTGNKKLLKKYIEETYPDLSSSQIQKIINLKYKDWGRLSRKLLDGITGTNIETGEIDTVINFLRNSSDNLMQIIGSQNYSFNNDIDKLRKKYIPQEISYEVVENLYVSPSVKKMIWQVIRITEEITKVMGYDPDKIFIEMAKSEEGKKTTISRKNKLLALYKAIKKDERDSQYEKLLTGLNKLDDSDLRSRKLYLYYTQMGRDMYTGEKIDLDKLFDSTHYDKDHIIPQSMKKDDSIINNLVLVNKNANQTTKGNIYPVPSSIRNNPKIYNYWKYLMEKEFISKEKYNRLIRNTPLTNEELGGFINRQLVETRQSTKAIKELFEKFYKKSKIIPVKAILASDLRKDMNTLKSREVNDLHHAHDAFLNIVAGDVWNREFTSNPINYVKENREGDKVKYSLSKYFTRPRKSKGKVIWTPEKGRKLIVDTLNKPSVLISNESHVKKGELFNATIAGKKDYKKGKIYLPLKKDDRLQDVSKYGGYKAINGAFFFLVEHTKSKKRIRSIELFPLHLLSKFYEDKNTVLDYAINVLQLQDPKIIIDKINYRTEIIIDNFSYLISTKSNDGSITVKPNEQMYWRVDEISNLKKIENKYKKDAILTEEDRKIMESYIDKIYQQFKAGKYKNRRTTDTIIEKYEIIDLDTLDNKQLYQLLVAFISLSYKTSNNAVDFTVIGLGTECGKPRITNLPDNTYLVYKSITGIYEKRIRIK

SEQ ID NO: 220 - protein, 1516 aa, Flavobacteriaceae bacterium
  Flavobacteriaceae bacterium S85
MLKQQKDKIIGMNKKILGLDLGTNSIGWALVKQDLENKYGEIIGCGSRIIPMSQDVLGKFDAGISISQTAERTNYRSVRKLIQRNTLRRERLHRVLHQLDFLPKHYNDSIDFEKKLGQFKTDKETKLNYFVNQHGKHEFLFKDSFNEMVKEFKEEQPELFYIKNNGKETKIPYDWTIYYLRKKALSKKISKEELSWLVLNFNQKRGYYQLRGEIDEEKEKNKRYEKLYVSEVVKTNNTIKKTGEYLYDIYFDNGWKYEKQTTKPQDWLHKHKEFIITTTTLKNGETKRTFKTVDSEKDWIAIKSKTEQDIKESNKTVGAFIYDTLLKNPTQKIRGSLVKTIERKFYREEFEKILKEQIKHRPEINVNTAIGKENYTKCVTELYPRNEAHANNILTNDFNYLFTKDILFYQRPLKSKKSEIANCQYEYRTYIKKKEKTGKEERVKQPLKATPKSHPLFQEFRLWQFIHNLKIYIRETTVGNKPLFDVDITDTFFTSENDWATLFEYLNNKKEIEQKHVLEYLVSKKIISKSEKTDYRWNYVEDKKYPGNETRVDFINRLKKVENLNVDEFLTSELEFKLWHIIYSVTDKNEYEKALENFAIRQNIDKDSFVNSFKKFPPFKSDYGAYSTKAIKKLLPLMRLGKFWDGSEIPKVVVEKITDIKTRLTSVNYDESLFKKDEKKILETIVDDITPKQLLKSFVKLKGKNHLAGLNTYQACYLVYERHSESSDITQWENPDDIDSFLNHFKQHSLRNPIVEQVVTETLRTVRDIWKYYGNGSPNYFNEIHIELGREMKNPADKRKQMSAKINENENTNQRIKGILQELMNDGVQDIKPYSPSQQEILKIYEEGISQNPNVDYSKVSEDEITKIKKSNNPTLKEIQRYKLWLEQKYISPYTGKPIPLSELFTPAYQIEHIIPQSRYFDNSLSNKIICESEVNEDKSNKTAYEYLKTNGGSIVHGHHLLSLKEYEDHCQHYFKKNRTKLKNLLSEEIPEGFINRQLNDSRYISKLIKGLLSNIVREENEQEATSKNIVPVTGSITSKLKQDWGLNDKWNEIIAPRFKRLNKMTNSNDFGYFDEKINTFRIQVPDAISRGFNKKRIDHRHHTLDALVIACCTKKHIQYLNSLNNEIIKHELKPSILIKNAQGDYTKHFMLPWNNFPIDCKNAIENTIVSFKQNLRVINKTSNKYQSYKDENGNLRLGKDGKPKKGLTKQTKGNNWAVRKAMHEDTFYGEIVDGENKGKLKIKTLLDTSFDVKKIEDKVLDKSIRTILINYLKQDKYKNLSKPHEEAFSPNGIIEMNKNIISLNNNIPHKPIKRVTLKHEKGKKFSIKTLLDKKTKFAKSATGTNVFFCIYKNINGKIKYHTPSFEEIIEIQKQEFEIKYKSKLNVPETLFDKKESFELLFYLQPNDLVYLPNDEELKNRQLIDFNNLNKKQIKRIYKFTDGSGTTANFIPYQVAKVIFNLNKKEQAKSSFKYPIQNEFGVGSPQSKNQKSIEGILIKERCIKLKIDRLGNISKA

SEQ ID NO: 221 - protein, 1473 aa, Flavobacterium branchiophilum
MAKILGLDLGTNSIGWAVVERENIDFSLIDKGVRIFSEGVKSEKGIESSRAAERTGYRSARKIKYRRKLRKYETLKVLSLNRMCPLSIEEVEEWKKSGFKDYPLNPEFLKWLSTDEESNVNPYFFRDRASKHKVSLFELGRAFYHIAQRRGFLSNRLDQSAEGILEEHCPKIEAIVEDLISIDEISTNITDYFFETGILDSNEKNGYAKDLDEGDKKLVSLYKSLLAILKKNESDFENCKSEIIERLNKKDVLGKVKGKIKDISQAMLDGNYKTLGQYFYSLYSKEKIRNQYTSREEHYLSEFITICKVQGIDQINEEEKINEKKFDGLAKDLYKAIFFQRPLKSQKGLIGKCSFEKSKSRCAISHPDFEEYRMWTYLNTIKIGTQSDKKLRFLTQDEKLKLVPKFYRKNDFNFDVLAKELIEKGSSFGFYKSSKKNDFFYWFNYKPTDTVAACQVAASLKNAIGEDWKTKSFKYQTINSNKEQVSRTVDYKDLWHLLTVATSDVYLYEFAIDKLGLDEKNAKAFSKTKLKKDFASLSLSAINKILPYLKEGLLYSHAVFVANIENIVDENIWKDEKQRDYIKTQISEIIENYTLEKSRFEIINGLLKEYKSENEDGKRVYYSKEAEQSFENDLKKKLVLFYKSNEIENKEQQETIFNELLPIFIQQLKDYEFIKIQRLDQKVLIFLKGKNETGQIFCTEEKGTAEEKEKKIKNRLKKLYHPSDIEKFKKKIIKDEFGNEKIVLGSPLTPSIKNPMAMRALHQLRKVLNALILEGQIDEKTIIHIEMARELNDANKRKGIQDYQNDNKKFREDAIKEIKKLYFEDCKKEVEPTEDDILRYQLWMEQNRSEIYEEGKNISICDIIGSNPAYDIEHTIPRSRSQDNSQMNKTLCSQRFNREVKKQSMPIELNNHLEILPRIAHWKEEADNLTREIEIISRSIKAAATKEIKDKKIRRRHYLTLKRDYLQGKYDRFIWEEPKVGFKNSQIPDTGIITKYAQAYLKSYFKKVESVKGGMVAEFRKIWGIQESFIDENGMKHYKVKDRSKHTHHTIDAITIACMTKEKYDVLAHAWTLEDQQNKKEARSIIEASKPWKTFKEDLLKIEEEILVSHYTPDNVKKQAKKIVRVRGKKQFVAEVERDVNGKAVPKKAASGKTIYKLDGEGKKLPRLQQGDTIRGSLHQDSIYGAIKNPLNTDEIKYVIRKDLESIKGSDVESIVDEVVKEKIKEAIANKVLLLSSNAQQKNKLVGTVWMNEEKRIAINKVRIYANSVKNPLHIKEHSLLSKSKHVHKQKVYGQNDENYAMAIYELDGKRDFELINIFNLAKLIKQGQGFYPLHKKKEIKGKIVFVPIEKRNKRDVVLKRGQQVVFYDKEVENPKDISEIVDFKGRIYIIEGLSIQRIVRPSGKVDEYGVIMLRYFKEARKADDIKQDNFKPDGVFKLGENKPTRKMNHNQFTAFVEGIDFKVLPSGKFEKI

SEQ ID NO: 222 - protein, 1459 aa, Flavobacterium columnare
MKFNLGLDIGTNSIGWALVNEDYENKKGKIIAAGSRIIPMTQDILDKFGSGAITETQTALRTDYRSKRKLIQRFLLRRERLHRVLNVLDFLPKHYAESIDFEKYFGKFLPNTEPKLAYNQNQFIFQNSFLEMLKEFQEKHPELLTNNKKIPYDWTIYYLRKKALNQRIEKEELAWLLLQFNQKRGYNQLRDEEEESVPNKQVEFYSLKIIDVVADQPKEGRDKRWYSINLENGWTYRRESKTPLFNWEGKTKDFIVTTDLNQDGSIKKDKEGKEKRSFRAPSEGDWTLLKKKTEKEIYESGKTLGTYIYDALLNTPDLKIKGDFIRTIDRSIYKEELQQIINKQKEYHLELNSSKLYKACLEELYPKNEIYKSALKNKDIAYLFINDILYYQRPLKAPKYNIGKCTYESRTFKKEDKKIREYIPAVAKSHPLFQEFRLWQWIKNLKIYEKLSSDNCTDFFLTNEQDFENLFEFLWNKKEIDHKGILEYLVKTKFPDLKPKQVKTKVKEYRWNYVYDHEKDESKTYPCGETYFLLKNKLDKIYNAQDDFLDKERLYNLWHIIYSVTDKKQYEKALAKFALKNHLDTKSFVNTFKRIPPFKNDYAIYSLKAIKKLLPLMRVGKYWNYDDIDPITKQKIQCIITGEENDTISTLVREKTNHFSNENDFKNLPLWLAGYIVYNSHNESSEIEKWKSPQDIDTFLKKFKQHALRNPIVEQVVTETLRVVRDIWSKKGQGKKDFFNEIHIELGKDLKNPVDKRRKLSSTNTKNESTNTRIKALLIELFTQGVENVKPNSPKHQEILKIFEEGALNSGIEIEEDIIKISNTDQPTKKQLELYILWLEHKYKSPYTGQSIPLSKLFTPNYEIEHIIPRSKYYDDNLSNKVICETEINRLKNNQLGYEFINNHEIREVTLEEGKTIRLLSPEQYWNFVTTYYAKNKAKRENLLLKELPVQMVEKQLNDTRYVSKYVMQLLSKIVRKEDGTDNGINSTNILSISGKMTRALKNDWDLNDVWNDLLLYRFERLNTITKTNLFTTYSEQKQKRMPIVPDQYAKGFHKKRLDHRHHALDAIVIACITRNHINYMNNQNIQGEKLKKNAIEKENYREILQKSRLDIRAQLCEKKYNDNDPTKYNWVFIKPWADFTENTKDILESIIPSFKQNLRIINKTVNYYEKYNENGKKVKVRQIKGDNWAIRKPLHKETISGKVHLSYKTPAKGKILTATRKVLDSSMDFKSIEKITDTGIQKILKNYLEYKKSPELAFSPEGIEELNATITKYNNGFHHKPIYKVRIYEEGVKFPLGNKGNKKSKYVEAEKGTNLFFAIYKDQENNRYFETIPFNDVLETLKKGMSAVPEKNQEENTLVFALSPQDLVFVPTLDEIENPDIVDFKNLTKDQTNRIYKMVSSSGKQCFFIKAEVATSIVNKMEFSTSNKMENSIEGIQIKSNCWKLKLDRLGTITRVIK

SEQ ID NO: 223 - protein, 1535 aa, Flavobacterium columnare
MTKILGLDLGTNSIGWAIRDTENEGINQILDKGARIFSEGVKSENGKEISRAAERTAYRSARKIKYRRKLRKYETLKVLSINGMCPLSVEEVEQWKKSGFKEYPLNPEFLDWLRTNEDKNINPYLFRDKASKQKVTLFELGRALYHIAQRRGFLSNRLDQSAEGVFEEHNPQIQNLIEDLDSSNTILNELKEYYINLGIIDETEKSGFKKDLDEGEKKLKSLYNSLVAITKKNANDIETCKQELIARLNKKEDLGKVKGKIKDISQAMLDRNFKTLGQYFFSLYNKERIRNQYTSREEHYLEEFIIICQTQGIEGINTNEKLPEKKFTGLAKDLYRAIFFQRPLKSQKGLIGKCSFEKNKSRCAVSHPDYEEFRMWSYLNTIKIGTQSEKTLRFLTLEEKLKLVPKFYRKSDFNFEVLAKELVEKGASFGYYKSSKKNEFFYWFNYKPTDSVSACVVSASLENAIGKDWKIKTFEYQTRNTEKNEVTKSVDYKDLWHLLSVATSDTYLYDFAIEKLKLEPKNAKAFSKTKLKKDFASLSLAAIAKILPYLKQGLLYSHAVFMANIENIVDADIWKDEEQQKFIQSKIVELVDNYIVEKSKLELINGLLKIYNTEDKEGRKVYYSKEAESLFEADLRKKLVPFYKANIIIEEHEQEIIFQDLFPILMDQLKKQEFIKIGRLDKQIEAFLEGENEEGQIFCNHTDKLKKLYHPSDIEVFKKKTIKDEWGNEKVVLGSPLTTSIKNPMAMRALHQLRKVLNTLIANDQIDEDTRIHIEMARELNDANKRKGIQDFQNENKKFREEAIKEIKKLYLEECHKDVNPTEDDILRYQLWLEQGKCEIYEEGNNISICDIIGSNPSYDIEHTIPRSISQDNSQMNKTLCSLKFNRSIKKQKMPVELSNYNDILPRIAHWKKEAEELTRQIETISRSIKSAATKVAKDKNIRKRHYLTLKRDYILGKYERFTWEEPKVGFKNSQIPDTGIITKYAQAYLKSYFKRVESVKGGAVAEFRKLWGIQESFIDENWWKHYKDKDRDKHTHHTIDAITIACMPKDKYDLLAHAWRLEDEQDKKAAKVLIEQAKPWKTFKEDIEKIETEILVSHFTPDNVKKQSKSIIKNRGKKVYVLKNELPVNFKNKIEGKDYFKLKFDSKILYKIPKKKEKQTDTFYEELPKNYLNGVEGKDYFKINTTGKTFYKIPIFNQGDTIRGSLHQETTYGAIKLPDIDIETKKPLHTDKGGFILKKDIKGNEIVFFVVRKEISKISENDVQNIVDNVVRKKIENAIANSLITFKIVKKKKVAVIKEGVTIWMREPNIEKGIEGIPIKKVRIITNSVKNPIEIKVHSPLSKSRHKHKQKVYGQNDENYAMALYELDGKREFELINNFNLAKLLKQSQSYYPLHKEKEIKGKKILVPIEKRNNKDVILKRGQQVVFYDKTVENPKDISEIIDFRERIYIIEGLTIQRQKDKKTSKVNEYGIIQLRHFKEARKSEEISKDNFKPDGEFKINENKPTRKMNHNQFTAFVEGIDFKVLPSGKFQKI

SEQ ID NO: 224 - protein, 1354 aa, Flavobacterium psychrophilum
  Flavobacterium psychrophilum JIP02/86
MKKILGLDLGTNSIGWAFINEAENEIEVSSIVNTGVRIVPLTTDEESDFKKGNTISINADRTLKRGARRGLQRFKQRREALLETFNRIKFIATDFVYAETGAATTFSSYQLRAKSAVEAVTKEELVKVLLMLNKKRGYKSSRKAKTAEEGDAIDGMKIAKEIFENNLTPGQWVYNSLSKGGKFIPDFYHSDLQKELEKIVRFQNQFHSEQINDKLLADIQGKSRTQTSQHFSKTLNIPLAENKGTREETKLQHYQWRNEALANELDMKILAFIITEINNQINQSSGYLGAISDRSKELYFNQETVGQYQYKQLQENVHAKLKNQVFYRQDYLDEFEKIWETQAKFHSELNEKLKAEIRDITIFYQRKLKSQKHLVSFCEFEKGHKAIPKSSPLFQEFRIWQNLNNVVVKNETTKEVFELSEELKQLIAEELQFKESMTDVQMLTFCELKKGTHTVNFKKIEGNRTNTSIYKAFEKILEVEGYEIDFSKMKPLEIKETVAPIFETLNINTVILDFDPTIQGNDFDKQPYYQLWHLLYSAEDDDKLKETLKTKFGFKENHLPFILNINLQADYGSLSAKAIKKILPHLMDGHIYDKACLMVGYNHSSSLTTAQNNDRVLKDTLELLKKNSLRNPVVEKILNQMINVINAIMKDPAMGKPDEIRVELARELKANNEQRKKATSDINTATTEHERIRKLLHSEFNIPRVTRNDIIRYKLWLETGGISLYTGNPIKASDLFSKNYDIEHIIPKSRLFDDSFSNKTLCERQLNIDKSNKTAYSFLQEKLSENDFAAYENRVKDLFKTGKIKSYTKYKKLLMADNEIPEGFIDRQLRETQYIAKKAKEILLEVSRNVTATIGSVTDKLRQDWELVDVMKELNWEKYDKLGLTHIEEGKNGERLSKIKDWTKRNDHRHHAMDAITVAFTKPAYIQYLNNLNAKTQGENKANSIIGIENKHLYRDKNNKLRFISPMKNFREEAKKQLESILISYKAKNKVVTKNKNTTKKSGGTNQKIQLTPRGRLHKETVYGKLQQYATKEEKVNASFTEDYIQKVAKKEYREALLKRLEENDNDPKKAFTGKNALNKTPIYISLKDNIIVPEKVKTVWLETDYTIRKDITPDLKIDKVIDVGIKRILQNRLNEFNGDPKKAFVNLGESPIWLNKEKGIAIKRVTISGVSNAQALHTKKDHLGNEILDKNGNPIPVDFISTGNNHHVAIYRDEKGNLQEEVVSFYDAVIRRNLGLSVINKNHEKGWEFLFSMKQNEFFIFPSDGFNPHEIDLLNPNNYHLISPNIFRVQKISTKNYMFNHHLETKAVDGEMLKSKKELSKTSYHFIQTPTNLNGIIKVRINHLGKIVHLGEY

SEQ ID NO: 225 - protein, 1458 aa, Fluviicola taffensis
MTKTILGLDLGTNSIGWALINQDFDNKKGEILGMGSRIIPMTQDIKDEFGKGNSISQTAERTRLRGVRRLIHRTLLRRERLHRVLNIIGFLPEHYANQIDFEKRFGKFKPESEPKISFDGNDVFLFEKSYQEMLVDFKIHQPQLVSNGKKIPHDWTIYYLRKKALSKKIEKEELAWILLNFNQKRGYYQLRGEEEEETPNKLVEFHSLKIVEVNADEPQKGKPEIWYSLVLENGWVYRRASKTPLFDWKDKIREFIVTTEINNDGTVKTDKEGTEKRSFRAPKPEDWTLQKKKTEFELSKSGNEVGAFIYESILQKPNQKIRGKLISTIERKFYKEELKTILKTQLFFHKELKDEKLYNACIEELYKNNEAHRSLLSNKGFEHLFINDILFYQRPLRSKKSQISNCPLEKRTYKKEGIEITEGIKVISKSNPIYQEFRLWQWISNLSLYCIEPTETNVTSTFLNSIEDYENLFEFLNNRKEIEQKHLLKYLLENQGFKGKLLTNELEKFRWNFVADKKYPCNETGSLLHTRLSKVKNISPDFLTKEIEHQLWHIIYSVTDKIEYEQALKTFARKNNLDVDSFFEHFKKIPPFESTYGAYSEKAIKKLLPLIRLGKYWNWEAIDSISKDRISKILSGEYDENIKNRVREKAVHLTSENNFQGLQEWLAKYIVYDRHSEGNDLGKWTSVSDLETYLKEFKQHSLRNPIVEQVITETLRVVKDIWIKHGKGTENFFDEIHVELGREMKNNSEDRKRLTNTITENENTNLRIKALLMEMMNDNDVENVRPYSPSQQEILKIYEDGALNSNIELDDEIVKISKKAEPTKSELQRYKLWLEQKYRSPYTGQVIPLNKLFTSEYEIEHVVPQSRFFDDSFSNKVICESAVNKRKDNQLGLQFIKNHSGEKVELGFGKVVQVFTEEQYLDFVKEHYSKNRSKHNKLLLEEIPEKMIERQLNDTRYISKFVSSILSNIVRSEKDDDGLNSKNILPGNGKITTELKRDWGLNDVWNDLILPRFERMNTITNSDLFTTYNDKYQKHLPTVPFEYSKGFQKKRIDHRHHAMDALVIACATRDHLNLMNNQSAKSELKRYDLQNKLRKKEPYFNQKENKQKEAFKDFIKPWGTFTEDSKNALEKIIISFKQNLRVINKATNSYESYKDEDGNLRIGKDGKPEKGLIKQKGLNWAIRKPLHKDTVSGQINLSRIKLPNGKILTATRKNLDTSFDLKTIENSITDTGIQKILKNYLLSKESPELAFSPEGLEEMNNEIEKYNNGKFHHPINKARIYELGSKFNVGQTGNRRDKFVEAAKGTNLFFAIYQDENKNRSYETIPLNEVIEHQKWRASLPKEEQEKIPLVPVNKLKGTFIFSLSPNDLVYVPSNDELERSASIDFSKLKKEQINRLYKMVSSSGSQCFFVKSEVATSVVNKMEYSSLNKMEKSIDNLMVKEICIKLKIDRLGNISKA

SEQ ID NO: 226 - protein, 1646 aa, Francisella tularensis
MNIKILPIAIDLGAKNTGVFSAFYQKGTSLESLDNKNGKVYELSKDSYTLLMNNRTARRHQRRGIDRKQLVKRLFKLIWTKQLNLEWNKDTQQTISFLLNRRGFSFITDGYSPEYLNIAPEAVKAILMSILDDYNGEDDLDSYLQSATENDSKIDELYNKLLQKALEFKLRKLCIDIKEDKVTTKTLKELSNTEFKLLANYLVDYDRILRTQKFSYTDKQGNLRELNYYHHDKYNIQEFLKRNIIINDVILEKLTDDLDIWNLNFDKFDFEKNLEKLENQEDKDYLQTHLHHFVFAVNKIKSEMASGGRHRSQYFQEITNVLVENNHQEGYLKNFCENLHNKKYSNLSVKNLVNLIGNLSNLELKPLRKYFNDKIHAKADYWDEQKFAETYSDWILGEWRVGAKDKDKKDGAKYSYKNLCDELKQKVGINQDGIINQTKSDFVDFLLELDPCRTIPPYLDNNNRKPPKCQSLILNPKFLDNKYPNWQQYLQELKKLQTVQNYLGNFEIDLKDLKSSKEQPYFVKYKSLNQQIASGQRDYKDLDARVLQFIFDRVKASDELLLNEIYSHAKKLKQNTSSELEKLELCKKLDEVIANSQLSQILKSQHVNGIFEQGTFLHLVCKYYKQRQRARDSRLYIMPEYRYDKKLDKYNNTGRFDDDNQLLTYCNHKPRQKRYQLLNDLAGVLQVSPNFLKDKIGSDDDLFISKWLVEHIRGFKKACEDSLKIQKDNRGLLNHKINIARNTKGKCEKEIFNLICKIEGSEDKKGNYKHGLAYELGVLLFGEPNQASKLEFDRKIKKFNSIYSFAQIQQIAFAERKGNANTCAVCSADNAHRMQQIKVAKPVEGNKDNIILSAKAQRLPAIPTRIVDGAVKKIATILARNIVDDNWDNIKQALSNNQQLHVPIITESNAFEFEPALADIKGKSLKDKRKKALERIDPENVFKDKNNRIKEFAKGISAYSDANLANGDFDGAKEELDHIIPRSHKKYGTLNDEANLICVTREDNQNRGNKAVFLYDLKPNYKLKQFNTTDDLEIEKKIADTIWDASKQDFKFGNYRSFINLTPQEQIAFRHALFLADKNPIKKAVIRAIDNRNRTFVNGTQRYFAEVLANNIYLRAKKENLATNRITFDYFGIETTNSNGRGIADVRKLYEKVDSDIQAYAKGDKPQDSYSHLIDAMIAFCVAADEHKNEGSIGLKMGNQYGLFPTPDKYDENTGEIISWHNDDIFRKIKVSDNQFSDKKLVRKKATEGFNTHRQMTRDGIYGESYLPILIHKNLNEVRKGYNWENSEEIKIFKGKKYDIQQLNNLVYCLKFVDKPISIDIQITTLEELRNILETNNISTTAEYYYINLKTQKLHEYYIENYNTALGYKKYTKEMEFLRSLAYRTERVKIKSIDDVSMILAKDSNFKAGKIELPFKTEWQRLYLEWQNTTIKDNHEFLKSYFSVKNATKQHKKVRKDFSLPISTNEGKLLVKRKTWDNNFIYQILNDSDSRADGTKPFIPAFDISKNEIVETIIKSFTSKNIFWLPKNIELQKVDNKSIFAIDTSRWFEVETPKDLIEIGVSTIQYKIDNNSRPKVRVKLDYVMDDDSKINYFMNHSLLKSRYPDKVLEILKQSTIIEFESSGFNKTIKEMLGMTLAGIYNETSNN

SEQ ID NO: 227 - protein, 1629 aa, Francisella tularensis
MNFKILPIAIDLGVKNTGVFSAFYQKGTSLERLDNKNGKVYELSKDSYTLLMNNRTARRHQRRGIDRKQLVKRLFKLIWTEQLNLEWDKDTQQAISFLFNRRGFSFITDGYSPEYLNIVPEQVKAILMDIFDDYNGEDDLDSYLKLATEQESKISEIYNKLMQKILEFKLRKLCTDIKDDKVSTKTLKEITSYEFELLADYLANYSEILKTQKFSYTDKQGNLKELSYYHHDKYNIQEFLKRHATINIQILDTLLTDDLDIWNFNFEKFDFDKNEEKLQNQEDKDHIQAHLHHFVFAVNKIKSEMASGGRHRSQYFQEITNVLDENNHQEGYLKNFCENLHNKKYSNLSVKNLVNLIGNLSNLELKPLRKYFNDKIHAKADHWDEQKFTETYCHWILGEWRVGVKDQDKKDGAKYSYKDLCNELKQKVTKAGLVDFLLELDPCRTIPPYLDNNNRKPPKCQSLILNPKFLDNQYPNWQQYLQELKKLQSIQNYLESFETDLKVLKSSKDQPYFVEYRSSNQQIASGQRDYKDLDARILQFIFDRVKASDELLLNEIYFQAKKLKQKASSELEKLESSKKLDEVIANSQLSQILKSQHTNGIFEQGTFLHLVCKYYKQRQRARDSRLYIMPEYRYDKKLHKYNNTGRFDDDNQLLTYCNHKPRQKRYQLLNDLAGVLQVSPNFLKDKIGSDDDLFISKWLVEHIRGFKKACEDSLKIQKDNRGLLNHKINIARNTKGKCEKEIFNLICKIEGSEDKKGNYKHGLAYELGVLLFGEPNEASKPEFDRKIKKFNSIYSFAQIQQIAFAERKGNANTCAVCSADNAHRMQQIKITEPVEDNKDKIILSAKAQRLPAITTRIVDGAVKKMATILAKNIVDDNWQNIKQVLSAKHQLHIPIITESNAFEFEPALADVKGKSLKDRRKKALERISPENIFKDKNNRIKEFAKGISAYSGANLTDGDFDGAKEELDHIIPRSHKKYGTLNDEANLICVTRGDNKNKGNRIFCLRDLANNYKLKQFETTDDLEIEKKIADTIWDANKKDFKFGNYRSFINLTPQEQKAFRHALFLADENPIKQAVIRAINNRNRTFVNGTQRYFAEVLANNIYLRAKKENLNTDKISFDYFGIPTIGNGRGIAEIRQLYEKVDSDIQAYAKGDKPQASYSHLIDAMLAFCIAADEHRNDGSIGLEIDKNYSLYPLDKNTGEVFTKDIFSQIKITDNEFSDKKLVRKKATEGFNTHRQMTRDGIYAENYLPILIHKELDEVRKGYTWKNSEEIKIFKGKKYDIQQLNNLLYCLKFVDKPISIDIQISTLEELRNILTTNNIAATAEYYYINLKTQKLHEYYIENYNTALGYKKYTKEMEFLRSLAYRSERVKIKSIDDVKQVLDKDSNFIIGKITLPFKKEWQRLYREWQNITIKDDYEFLKSFFNVKSITKLHKKVRKDFSLPISTNEGKFLVKRKTWDNNFIYQILNDSDSRVDGTKPFIPAFDISKNEIVEAIIDSFTSKNIFWLPKNIELQKVDNKNIFAIDTSKWFEVETPSDLRDIGVATIQYKIDNNSRPKVRVKLDYVIDDDSKINYFTNHSLLKSRYPDKVLEILKQSTIIEFESSGFNKTIKEMLGMTLAGIYNETSNN

SEQ ID NO: 228 - protein, 1629 aa, Francisella novicida
  Francisella novicida FTG
MNFKILPIAIDLGVKNTGVFSAFYQKGTSLERLDNKNGKVYELSKDSYTLLMNNRTARRHQRRGIDRKQLVKRLFKLIWTEQLNLEWDKDTQQAISFLFNRRGFSFITDGYSPEYLNIVPEQVKAILMDIFDDYNGEDDLDSYLKLATEQESKISEIYNKLMQKILEFKLMKLCTDIKDDKVSTKTLKEITSYEFELLADYLANYSESLKTQKFSYTDKQGNLKELSYYHHDKYNIQEFLKRHATINDRILDTLLTDDLDIWNFNFEKFDFDKNEEKLQNQEDKDHIQAHLHHFVFAVNKIKSEMASGGRHRSQYFQEITNVLDENNHQEGYLKNFCENLHNKKYSNLSVKNLVNLIGNLSNLELKPLRKYFNDKIHAKADHWDEQKFTETYCHWILGEWRVGVKDQDKKDGAKYSYKDLCNELKQKVTKAGLVDFLLELDPCRTIPPYLDNNNRKPPKCQSLILNPKFLDNQYPNWQQYLQELKKLQSIQNYLDSFETDLKVLKSSKDQPYFVEYKSSNQQIASGQRDYKDLDARILQFIFDRVKASDELLLNEIYFQAKKLKQKASSELEKLESSKKLDEVIANSQLSQILKSQHTNGIFEQGTFLHLVCKYYKQRQRARDSRLYIMPEYRYDKKLHKYNNTGRFDDDNQLLTYCNHKPRQKRYQLLNDLAGVLQVSPNFLKDKIGSDDDLFISKWLVEHIRGFKKACEDSLKIQKDNRGLLNHKINIARNTKGKCEKEIFNLICKIEGSEDKKGNYKHGLAYELGVLLFGEPNEASKPEFDRKIKKFNSIYSFAQIQQIAFAERKGNANTCAVCSADNAHRMQQIKITEPVEDNKDKIILSAKAQRLPAIPTRIVDGAVKKMATILAKNIVDDNWQNIKQVLSAKHQLHIPIITESNAFEFEPALADVKGKSLKDRRKKALERISPENIFKDKNNRIKEFAKGISAYSGANLTDGDFDGAKEELDHIIPRSHKKYGTLNDEANLICVTRGDNKNKGNRIFCLRDLADNYKLKQFETTDDLEIEKKIADTIWDANKKDFKFGNYRSFINLTPQEQKAFRHALFLADENPIKQAVIRAINNRNRTFVNGTQRYFAEVLANNIYLRAKKENLNTDKISFDYFGIPTIGNGRGIAEIRQLYEKVDSDIQAYAKGDKPQASYSHLIDAMLAFCIAADEHRNDGSIGLEIDKNYSLYPLDKNTGEVFTKDIFSQIKITDNEFSDKKLVRKKAIEGFNTHRQMTRDGIYAENYLPILIHKELNEVRKGYTWKNSEEIKIFKGKKYDIQQLNNLVYCLKFVDKPISIDIQISTLEELRNILTTNNIAATAEYYYINLKTQKLHEYYIENYNTALGYKKYSKEMEFLRSLAYRSERVKIKSIDDVKQVLDKDSNFIIGKITLPFKKEWQRLYREWQNTTIKDDYEFLKSFFNVKSITKLHKKVRKDFSLPISTNEGKFLVKRKTWDNNFIYQILNDSDSRVDGTKPFIPAFDISKNEIVEAIIDSFTSKNIFWLPKNIELQKVDNKNIFAIDTSKWFEVETPSDLRDIGVATIQYKIDNNSRPKVRVKLDYVIDDDSKINYFTNHSLLKSRYPDKVLEILKQSTTIEFESSGFNKTIKEMLGMTLAGIYNETSNN

SEQ ID NO: 229 - protein, 1629 aa, Francisella novicida
  Francisella novicida GA99-3548
MNFKILPIAIDLGVKNTGVFSAFYQKGTSLERLDNKNGKVYELSKDSYTLLMNNRTARRHQRRGIDRKQLVKKLFKLIWTEQLNLEWDKDTQQAISFLFNRRGFSFITDGYSPEYLNIVPEQVKAILMDIFDDYNGEDDLDSYLKLATEQESKISEIYNKLMQKILEFKLRKLCTDIKDDKVSTKTLKEITSYEFELLADYLANYSESLKTQKFSYTDKQGNLKELSYYHHDKYNIQEFLKRHATINDEILDTLLTDDLDIWNFNFEKFDFDKNEEKLQNQEDKDHTQAHLHHFVFAVNKIKSEMASGGRHRGQYFQEITNVLDENNHQEGYLKNFCENLHNKKYSNLSVKNLVNLIGNLSNLELKPLRKYFNDKIHAKADHWDEQKFTETYCHWILGEWRVGLKDQDKKEGAKYSYKDLCNELKQKVTNAGLIDFLLELDPCRTIPPYLDNNNRKPPKCQSLILNPKFLDNQYPNWQQYLQELKKLQIIQDYLESFETDLKVLKSSKDQPYFVEYKSSNQQIASGQRDYKDLDARILQFIFDRVKASDELLLNEIYFQAKKLKQKASSELEKLESSKKLDEVIANSQLSKILKSQHTNGIFEQGTFLHLVCKYYKQRQRARDSRLYIMPEYRYDKKLDKYNNTGRFDDDNQLLTYCNHKPRQKRYQLLNDLAGVLQVSPNFLKDKIGSDDDLFISKWLVEHIRGFKKACEDSLKIQKDNRGLLNHKINIARNTKGKCEKEIFNLICKIEGSEDKKGNYKHGLAYELGVLLFGEPNEASKPEFDRKIKKFNSIYSFAQIQQIAFAERKGNANTCAVCSADNAHRMQQIKITEPVEDNKDKIILSAKAQRLPAIPTRIVDGAVKKMATILAKNIVDDNWQNIKQVLSAKHQLHIPIITESNAFEFEPALADVKGKSLKDRRKKALERISPENIFKDKNNRIKEFAKGISAYSGANLTDGDFDGAKEELDHIIPRSHKKYGTLNDEANLICVTRDDNKNKGNRIFCLHDLANNYKLKQFETTDDLEIEKKIADTIWDASKKDFKFGNYRSFINLTPQEQKAFRHALFLADENPIKQAVIRAINNRNRTFVNGTQRYFAEVLANNIYLRAKKENLNTDKISFDYFGIPTIGNGRGIAEIRQLYEKVDSDIQVYAKGDKPQASYSHLIDAMLAFCIAADEHRNDGSIGLEIDKNYSLYPLDKNTGEVFTKDIFSQIKITDNEFSDKKLVRKKATEGFNTHRQMTRDGIYAENYLPILIHKELDEVRKGYTWKNSEEIKIFKGKKYDIQQLNNLLYCLKFVDKPISIDIQISTLEELRNILTTNNIAATAEYYYINLKTQKLHEYYIENYNTALGYKKYTKEMEFLRSLAYRSERVKIKSIDDVKQVLDKDSNFIIGKITLPFKKEWQRLYREWQNTTIKDDYEFLKSFFNVKSITKLHKKVRKDFSLPISTNEGKFLVKRKTWDNNFIYQILNDSDSRVDGTKPFIPAFDISKNEIVEAIIDSFTSKNIFWLPKNIELQKVDNKNIFAIDTSKWFEVETPSDLRDIGVATIQYKIDNNSRPKVRVKLDYVIDDDSKINYFTNHSLLKSRYPDKVLEILKQSTIIEFESSGFNKTIKEMLGMTLAGIYNETSNN

SEQ ID NO: 230 - protein, 1629 aa, Francisella tularensis; identical to SEQ ID NO: 30

SEQ ID NO: 231 - protein, 1629 aa, Francisella novicida
  Francisella novicida GA99-3549
MNVKILPIAIDLGVKNTGVFSAFYQKGTSLERLDNKNGKVYELSKDSYTLLMNNRTARRHQRRGIDRKQLVKRLFKLIWTEQLNLEWDKDTQQAISFLFNRRGFSFITDGYSPEYLNIVPEQVKAILMDIFDDYNGEDDLDSYLKLATEQESKISEIYNKLMQKILEFKLRKLCTDIKDDKVSTKTLKEITSYEFELLADYLANYSEILKTQKFSYTDKQGNLKELSYYHHDKYNIQEFLKRHATINDEILDTLLTDDLDIWNFNFEKFDFDKNEEKLQNQEDKDHTQAHLHHFVFAVNKIKSEMASGGRHRGQYFQEITNVLDENNHQEGYLKNFCENLHNKKYSNLSVKNLVNLIGNLSNLELKPLRKYFNDKIHAKADHWDEQKFTETYCHWILGEWRVGVKDQDKKDGAKYSYKDLCNELKQKVTKAGLVDFLLELDPCRTIPPYLDNNNRKPPKCQSLILNPKFLDNQYPNWQQYLQELKKLQSIQNYLESFETDLKVLKSSKDQPYFVEYKSSNQQIASGQRDYKDLDARILQFIFDRVKASDELLLNEIYFQAKKLKQKASSELEKLESSKKLDEVIANSQLSQILKSQHTNGIFEQGTFLHLVCKYYKQRQRARDSRLYIMPEYRYDKKLDKYNNTGRFDDDNQLLTYCNHKPRQKRYQLLNDLAGVLQVSPNFLKDKIGSDDDLFISKWLVEHIRGFKKACEDSLKIQKDNRGLLNHKINIARNTKGKCEKEIFNLICKIEGSEDKKGNYKHGLAYELGVLLFGEPNEASKPEFDRKIKKFNSIYSFAQIQQIAFAERKGNANTCAVCSADNAHRMQQIKITEPVEDNKDKIILSAKAQRLPAIPTRIVDGAVKKMATILAKNIVDDNWQNIKQVLSAKHQLHIPIITESNAFEFEPALADVKGKSIKDRRKKALERISPENIFKDKNNRIKEFAKGISAYSGDNLASGDFDGAKEELDHIIPRSHKKYGTLNDEANLICVTRDDNKNKGNRIFCLHDLANNYKLKQFETTDDLEIEKKIADTIWDASKKDFKFGNYRSFINLTPQEQKAFRHALFLADENPIKQAVIRAINNRNRTFVNGTQRYFAEVLANNIYLRAKKENLNTDKISFDYFGIPTIGNGRGIVEIRQLYEKVDSDIQAYAKGDKPQASYSHLIDAMLAFCIAADEHRNDGSIGLEIDKNYSLYPLDKNTGEVFTKDIFSQIKITNNEFSDKKLVRKKATEGFNTHRQMTRDGIYAENYLPILIHKELDEVRKGYTWGNSEELKIHKGKKYDIQQLNNLVYCLKFIDKSISIDIQISTLEELRNILTTNNIATTAEYYYINLKTQKLHEYYIENYNTALGYKKYTKEMEFLRSLAYRSERVKIKSIDDVKQVLDKDSNFIIGKITLPFKKEWQRLYREWQNTTIKDDYEFLKSFFNVKSITKLHKKVRKDFSLPISTNEGKFLVKRKTWDNNFIYQILNDSDSRVDGTKPFIPAFDISKNEIVEAIIDSFTSKNIFWLPKNIELQKVDNKNIFAIDTSKWFEVETPSDLRDIGVATIQYKIDNNSRPKVRVKLDYVIDDDSKINYFTNHSLLKSRYPDKVLEILKQSTIIEFESSGFNKTIKEMLGMTLAGIYNETSNN

SEQ ID NO: 232 - protein, 1323 aa, Fructobacillus fructosus
  Fructobacillus fructosus KCTC 3544
MVYDVGLDIGTGSVGWVALDENGKLARAKGKNLVGVRLFDTAQTAADRRGFRTTRRRLSRRKWRLRLLDELFSAEINEIDSSFFQRLKYSYVHPKDEENKAHYYGGYLFPTEEETKKFHRSYPTIYHLRQELMAQPNKRFDIREIYLAIHHLVKYRGHFLSSQEKITIGSTYNPEDLANAIEVYADEKGLSWELNNPEQLTEIISGEAGYGLNKSMKADEALKLFEFDNNQDKVAIKTLLAGLTGNQIDFAKLFGKDISDKDEAKLWKLKLDDEALEEKSQTILSQLTDEEIELFHAVVQAYDGFVLIGLLNGADSVSAAMVQLYDQHREDRKLLKSLAQKAGLKHKRFSEIYEQLALATDEATIKNGISTARELVEESNLSKEVKEDTLRRLDENEFLPKQRTKANSVIPHQLHLAELQKILQNQGQYYPFLLDTFEKEDGQDNKIEELLRFRIPYYVGPLVTKKDVEHAGGDADNHWVERNEGFEKSRVTPWNFDKVFNRDKAARDFIERLTGNDTYLIGEKTLPQNSLRYQLFTVLNELNNVRVNGKKFDSKTKADLINDLFKARKTVSLSALKDYLKAQGKGDVTITGLADESKFNSSLSSYNDLKKTFDAEYLENEDNQETLEKIIEIQTVFEDSKIASRELSKLPLDDDQVKKLSQTHYTGWGRLSEKLLDSKIIDERGQKVSILDKLKSTSQNFMSIINNDKYGVQAWITEQNTGSSKLTFDEKVNELTTSPANKRGIKQSFAVLNDIKKAMKEEPRRVYLEFAREDQTSVRSVPRYNQLKEKYQSKSLSEEAKVLKKTLDGNKNKMSDDRYFLYFQQQGKDMYTGRPINFERLSQDYDIDHIIPQAFTKDDSLDNRVLVSRPENARKSDSFAYTDEVQKQDGSLWTSLLKSGFINRKKYERLTKAGKYLDGQKTGFIARQLVETRQIIKNVASLIEGEYENSKAVAIRSEITADMRLLVGIKKHREINSFHHAFDALLITAAGQYMQNRYPDRDSTNVYNEFDRYTNDYLKNLRQLSSRDEVRRLKSFGFVVGTMRKGNEDWSEENTSYLRKVMMFKNILTTKKTEKDRGPLNKETIFSPKSGKKLIPLNSKRSDTALYGGYSNVYSAYMTLVRANGKNLLIKIPISIANQIEVGNLKINDYIVNNPAIKKFEKILISKLPLGQLVNEDGNLIYLASNEYRHNAKQLWLSTTDADKIASISENSSDEELLEAYDILTSENVKNRFPFFKKDIDKLSQVRDEFLDSDKRIAVIQTILRGLQIDAAYQAPVKIISKKVSDWHKLQQSGGIKLSDNSEMIYQSATGIFETRVKISDLL

SEQ ID NO: 233 - protein, 1374 aa, Fusobacterium nucleatum
  Fusobacterium nucleatum subsp. vincentii ATCC 49256
MKKQKFSDYYLGFDIGTNSVGWCVTDLDYNVLRFNKKDMWGSRLFDEAKTAAERRVQRNSRRRLKRRKWRLNLLEEIFSDEIMKIDSNFFRRLKESSLWLEDKNSKEKFTLFNDDNYKDYDFYKQYPTIFHLRDELIKNPEKKDIRLIYLALHSIFKSRGHFLFEGQNLKEIKNFETLYNNLISFLEDNGINKSIDKDNIEKLEKIICDSGKGLKDKEKEFKGIFNSDKQLVAIFKLSVGSSVSLNDLFDTDEYKKEEVEKEKISFREQIYEDDKPIYYSILGEKIELLDIAKSFYDFMVLNNILSDSNYISEAKVKLYEEHKKDLKNLKYIIRKYNKENYDKLFKDKNENNYPAYIGLNKEKDKKEVVEKSRLKIDDLIKVIKGYLPKPERIEEKDKTIFNEILNKIELKTILPKQRISDNGTLPYQIHEVELEKILENQSKYYDFLNYEENGVSTKDKLLKTFKFRIPYYVGPLNSYHKDKGGNSWIVRKEEGKILPWNFEQKVDIEKSAEEFIKRMTNKCTYLNGEDVIPKDSFLYSEYIILNELNKVQVNDEFLNEENKRKIIDELFKENKKVSEKKFKEYLLVNQIANRTVELKGIKDSFNSNYVSYIKFKDIFGEKLNLDIYKEISEKSILWKCLYGDDKKIFEKKIKNEYGDILNKDEIKKINSFKFNTWGRLSEKLLTGIEFINLETGECYSSVMEALRRTNYNLMELLSSKFTLQESIDNENKEMNEVSYRDLIEESYVSPSLKRAILQTLKIYEEIKKITGRVPKKVFIEMARGGDESMKNKKIPARQEQLKKLYDSCGNDIANFSIDIKEMKNSLSSYDNNSLRQKKLYLYYLQFGKCMYTGREIDLDRLLQNNDTYDIDHIYPRSKVIKDDSFDNLVLVLKNENAEKSNEYPVKKEIQEKMKSFWRFLKEKNFISDEKYKRLTGKDDFELRGFMARQLVNVRQTTKEVGKILQQIEPEIKIVYSKAEIASSFREMFDFIKVRELNDTHHAKDAYLNIVAGNVYNTKFTEKPYRYLQEIKENYDVKKIYNYDIKNAWDKENSLEIVKKNMEKNTVNITRFIKEEKGELFNLNPIKKGETSNEIISIKPKLYDGKDNKLNEKYGYYTSLKAAYFIYVEHEKKNKKVKTFERITRIDSTLIKNEKNLIKYLVSQKKLLNPKIIKKIYKEQTLIIDSYPYTFTGVDSNKKVELKNKKQLYLEKKYEQILKNALKFVEDNQGETEENYKFIYLKKRNNNEKNETIDAVKERYNIEFNEMYDKFLEKLSSKDYKNYINNKLYTNFLNSKEKFKKLKLWEKSLILREFLKIFNKNTYGKYEIKDSQTKEKLFSFPEDTGRIRLGQSSLGNNKELLEESVTGLFVKKIKL

SEQ ID NO: 234 - protein, 1367 aa, Fusobacterium sp.
  Fusobacterium sp. 1_1_41FAA
MKKQQFSDYYLGFDIGTNSVGWCVTDFNYNVLRFNKKDMWGSRLFDEAKTAAERRVQRNSRRRLKRRKWRLNLLEEIFSDEILKIDSNFFRRLKESSLWLEDKSSKEKFTLFNDDNYKDYDFYKQYPTIFHLRNELIKNPEKKDIRLVYLALHSIFKSRGHFLFEGQNLKDIKNFETLYNNLMAFLEDNDIYKNIDSSYIGNLENIICDSKKGLKDKEKEFKEIFNSDKQLVGFFKLSVGSSVSLNDLFDTDEYKKGEVEKEKISFREQIYEDDKPIYYSILGEKIEFLDIAKSFYDFMVLNNILADSQYISEAKVKLYDEHKRDLKNLKYIIRKYNKENYDKLFKDKNESNYSAYIGLNKEKGKKEVIEKSRLKIDDFAKIIKGYLPKAEKIDEKDRSIFNEILDKIELKTILPKQRISDNGTLPYQIHEAELEKILENQAKYYDFLNHEENGISTKDKLLMTFKFRIPYYVGPLNSYHKNKGGNSWIVRKEEGKILPWNFEQKVDIEKSAEEFIKRMTNKCTYLNGEDVIPKDSFLYSEYIILNELNKVQVNDEFLNKEIKKKIIEDLFKKSKKISEKNFREYLLVNQITNKTVELKGVKDAFNSNYVSYIKFKDIFGDKLNLDIYKEISEKSILWKCLYGDDKKIFEKKIKSVYGDILTKDEIKKINSFKFNTWGRLSEKLLTEIEFIDLETGECYSSVMDALRRTNYNLMELLSSKFTLQENIDNENKEVSEFSYRDLVEESYVSPSLKRAILQTLKIYEEIRKITGRIPKKVFIEMARGGDETMKNKKIPARQEQLKKLYDSCGKDISNFSIDIKEMKNSLNSYDNNSLRQKKLYLYYLQFGKCMYTGKEIDLNRLLQNNDTYDIDHIYPRSKVIKDDSFDNLVLVLKNENAEKSNEYPLKKEIQEKMKSFWKFLKEKNFISDEKYKRLTGKDEFELRGFMARQLVNVRQTTKEAGKILQQIEPEIKIVYSKAEIASSFREMFDFIKVRELNDTHHAKDAYLNIVAGNVYNTKFTEKPYRYLQEIKENYDVKKIYNYDIKNAWDKEKSLEIVKKNMEKNTVNITRFIKEEKGQLFDLNPIRKGETSNEIIAIKPKFYEGSTEKLNEKYGYYKSLNPAYFIYVEHKEKNKIIRSFERVNLVDVNKIKDEKSLIKYLIENKGLIEPKVIKKVYKRQVILINNFPYSIVALDSNKLMDFENLKPLFLERKYEKILKNAIKFLEDNQGKTEEYYKFLYLKKKDRNEKNETIDSVKERYNIEFNEMYDKFLEKLDSKDYKNYINNKKYSELVNVKEKFIKLNLFDKAFTLKSFLDLFNRKTMADFSKVGLTKYLGKIQKISSNVLSKNELHLLEESVTGLFVKKIKL

SEQ ID NO: 235 - protein, 1367 aa, Fusobacterium sp.
  Fusobacterium sp. 3_1_27
MKKQKFSDYYLGFDIGTNSVGWCVTDLDYNVLRFNKKDMWGSRLFDEAKTAAERRVQRNSRRRLKRRKWRLNLLEEIFSDEIMKIDSNFFRRLKESSLWLEDKNSKEKFTLFNDDNYKDYDFYKQYPTIFHLRDELIKNPEKKDIRLIYLALHSIFKSRGHFLFEGQNLKEIKNFETLYNNLISFLEDNGINKSIDKDNIKKLEKIICDSGKGLKDKEKEFKEIFNSDKQLVAIFKLSVGSSVSLNDLFDTDEYKKEEVEKEKISFREQIYEDDKPIYYSILGEKIELLDIAKSFYDFMVLNNILSDSNYISEAKVKLYEEHKKDLKNLKYIIRKYNKENYDKLFKDKNENNYPAYIGLNKEKGKKEVVEKSGLKIDDLIKVIKGYLPKPERIEEKDKIIFNEILNKIELKTILPKQRISDNGTLPYQIHEVELEKILENQSKYYDFLNYEENGVSTKDKLLKTFKFRIPYYVGPLNSYHKDKGGNSWIVRKEEGKILPWNFEQKVDIEKSAEEFIKRMTNKCTYLNGEDVIPKDSFLYSEYIILNELNKVQVNDEFLNEENKRKIIDELFKENKKVSEKKFKEYLLVNQIANRTVELKGIKDSFNSNYVSYIKFKDIFGEKLNLDIYKEISEKSILWKCLYGDDKKIFEKKIKNEYGDILNKDEIKKINSFKFNTWGRLSEKLLTGIEFINLETGECYSSVMEALRRTNYNLMELLSSKFTLQESIDNGNKEMNEVSYRDLIEESYVSPSLKRAILQTLKIYEEIKKITGRVPKKVFIEMARGGDETMKNKKIPARQEQLKKLYDSCGNDIANFSIDIKKMKSSLSSYDNNSLRQKKLYLYYLQFGKCMYTGREIDLDRLLQNNDTYDIDHIYPRSKVIKDDSFDNLVLVLKNENAEKSNEYPVKKEIQEKMKSFWRFLKEKNFISDEKYKRLTGKDDFELRGFMARQLVNVRQTTKEVGKILQQIEPEIKIVYSKAEIASSFREMFDFIKVRELNDTHHAKDAYLNIVAGNVYNTKFTEKPYRYLQEIKENYDVKKIYNYDIKNAWDKENSLEIVKKNMKKNTVNITRFIKEEKGQLFDLNPIKKGETSNEIISIKPKLYNGKEEKLNEKYGYYKSLNPAYFLYVEHKEKNKRIKSFERVNLVDVNNIKDEKSLVKYLIENKKLVEPRLIKKVYKRQVILINDYPYSIVALDSNKLMDFENLKPLFLENKYEKILKNVIKFLEDNQGKSEENYKFIYLKKKDRYEKNETLESVKDRYNLEFNEMYDKFLEKLDSKDYKNYINNKKYKNLLDVKEKFIKLNLFDKAFTLKSFLDLFNRKTMADFSKVGLTKYLGKIQKISSNVLSKNELYLLEESVTGLFVKKIKL

SEQ ID NO: 236 - protein, 1367 aa, Fusobacterium sp.
  Fusobacterium sp. 3_1_36A2
MKKQKFSDYYLGFDIGTNSVGWCVTDLDYNVLRFNKKDMWGSRLFDEAKTAAERRVQRNSRRRLKRRKWRLNLLEEIFSDEIMKIDSNFFRRLKESSLWLEDKNSKEKFTLFNDDNYKDYDFYKQYPTIFHLRDELIKNPEKKDIRLIYLALHSIFKSRGHFLFEGQNLKEIKNFETLYNNLISFLEDNGINKSIDKDNIKKLEKIICDSGKGLKDKEKEFKEIFNSDKQLVAIFKLSVGSSVSLNDLFDTDEYKKEEVEKEKISFREQIYEDDKPIYYSILGEKIELLDIAKSFYDFMVLNNILSDSNYISEAKVKLYEEHKKDLKNLKYIIRKYNKENYDKLFKDKNENNYPAYIGLNKEKGKKEVVEKSGLKIDDLIKVIKGYLPKPERIEEKDKTIFNEILNKIELKTILPKQRISDNGTLPYQIHEVELEKILENQSKYYDFLNYEENGVSTKDKLLKTFKFRIPYYVGPLNSYHKDKGGNSWIVRKEEGKILPWNFEQKVDIEKSAEEFIKRMTNKCTYLNGEDVIPKDSFLYSEYIILNELNKVQVNDEFLNEENKRKIIDELFKENKKVSEKKFKEYLLVNQIANRTVELKGIKDSFNSNYVSYIKFKDIFGEKLNLDIYKEISEKSILWKCLYGDDKKIFEKKIKNEYGDILNKDEIKKINSFKFNTWGRLSEKLLTGIEFINLETGECYSSVMEALRRTNYNLMELLSSKFTLQESIDNGNKEMNEVSYRDLIEESYVSPSLKRAILQTLKIYEEIKKITGRVPKKVFIEMARGGDETMKNKKIPARQEQLKKLYDSCGNDIANFSIDIKKMKSSLSSYDNNSLRQKKLYLYYLQFGKCMYTGREIDLDRLLQNNDTYDIDHIYPRSKVIKDDSFDNLVLVLKNENAEKSNEYPVKKEIQEKMKSFWRFLKEKNFISDEKYKRLTGKDDFELRGFMARQLVNVRQTTKEVGKILQQIEPEIKIVYSKAEIASSFREMFDFIKVRELNDTHHAKDAYLNIVAGNVYNTKFTEKPYRYLQEIKENYDVKKIYNYDIKNAWDKENSLEIVKKNMKKNTVNITRFIKEEKGQLFDLNPIKKGETSNEIISIKPKLYNGKEEKLNEKYGYYKSLNPAYFLYVEHKEKNKRIKSFERVNLVDVNNIKDEKSLVKYLIENKKLVEPRLIKKVYKRQVILINDYPYSIVALDSNKLMDFENLKPLFLENKYEKILKNVIKFLEDNQGKSEENYKFIYLKKKDRYEKNETLESVKDRYNLEFNEMYDKFLEKLDSKDYKNYINNKKYKNLLDVKEKFIKLNLFDKAFTLKSFLDLFNRKTMADFSKVGLTKYLGKIQKISSNVLSKNELYLLEESVTGLFVKKIKL

SEQ ID NO: 237 - protein, 1391 aa, Galbibacter sp.
  Galbibacter sp. ck-I2-15
MKTILGLDLGTNSIGWALVKEAENENEVSDIIKLGVRVNPLTVDELTNFEGGKAYSNNAERTLKRGARRNLQRYKLRRENLIEILLKNGLINKDTALTEVGKETTHQTLKLRSKSANEKVSLEDLAKILLSINKKRGYKSSRKVNAEDDGVAIDGMEVAKLLYDENMTPGEYVLRLLESGKKHLPDFYRSDLQEEFNLVWKKQSEFYPLILTKELFFELHGKNKSQTWAICKEPLGIVGVKLKGSAKEQKFARYRLRKEALTQQIELEHLAIVLQDINNDSNKSSGYLGAISDRSKELFFNKETVGQYQYKQLQKDPNTSLKNQVFYRQDYLDEFEVIWRNQAKFYPQLTNELKQEIRDVVIFYQRKLKSQKNLISFCQFESTQQNYVEKETGKTKIRTIGRRVIPRSSPLFQEFKIWQSLNNLKFVNSESNQIIQFIELEDDVKKVVFDELNLRGDLKPNQVLKILSKYMKIGKLTQWKCNLEEIEGNRTNSALYNVFQMIAEEEGYGFNWGKKSALEIKSELKAIFSSIGINDSILDFDFSKKLDQQLSYQLWHLLYSAEEGNSKITEEDKFTYGNTGVALKKKLHLKFGFKPEYSTLISNLRFTSDYGNLSSKAISKILPFLRDGSDYSKACQYAGYNHSNSLSADELDNRELKPKLELLKKNSLRNPVVEKILNQMVNVVNQVIDNYGKPDEVRIELARELKKSAKERSQMTKNISDATRRNAEIKKYLSKEFGIPNPTKGDVIRYRLWEELASNGYKDLFRDKYIPKEKLFSNEIDIEHIIPKALLFDDSFSNKTLAFKVDNLKKADRTAFDFMSTDFSKDVDSYIGRIETLHKDGKISSSKYKKLMIPKSKLVDGFIERDLRNTQYIAKQARKMLLEVFKTVVPTTGKITDKLREDWDLINVMKELNFPKYKALGLTKKIERFDVGSEKIKSINVIEGWSKRNDHRHHAMDALAVAFTTHNHIQYLNYLNARKDIHHEMHGTIKSIENQIIGKDVMGKRRFIPPISDLRMKAKLQIESILISFKNKNKVVTWSVNKTKLKGKDNYNKRRQLTPRGQLHKETVYGKIKLIDPKPLKLNNKFTLVRASMIVDKVHREIVLQHLSKYDNNSEVAFDSKTIKIDPILIEGIGLKEVVCYEDVFKIRKKISGDNFKNEKHLEKVIDEKVKQILKDRVIKFQGNFKEAFSNLEENPIWLNKSKGIAVKSVAIKGVNNAESLHEGKDHFGDQILDKNKKQIPVDFVSTGNNHHVGIYEDKDGNLQERVVSFFEAVTRVNEGLPIIDKTYNSDIGWKFKFTMKQNEMFVFPSDDFDPNEFDLTDGKNAAKISPNLYRVQKIATKNYMFRHHLETVVTNDLEFTYKSIRSTGWLRNLVKVRINHLGEIVYVGEY

SEQ ID NO: 238 - protein, 1025 aa, Unknown
  Description of Unknown: gamma proteobacterium HdN1 polypeptide
MGGYMPQLMRYRLALDIGSTSIGWAMIRLSMQNEPIAIIRMGVRIFSDGRNPKDGSSLAVTRRVARQMRRRRDRLLKRKTRLLNALVQKKFFPEDADARKALVVLNPYELRKEGLYRQLSGPEFGRALFHISQRRGFLSNRKTDKKDNDSSVLKKAIVDLRQQLEVENCQTIGEWLFKQQQSGKSVRARLRGKTQKDKAYDFYIDRAMIAHEFDTLWVSQAKYDPLLFNEDARAILRDILLYQRPLKPVKPGRCTLIPDESRAPLALPLTQQARIYQELNHLRITTPALGAQALTVAQRNTIAALLEKSDVTFVKIAKALGLTSTTEFNLQDIKRDRLKGNATAIILARNQYFGRRWHDFNADLQNLIVDKLVNEGSETALIEWLKANTDVDESAAERVSGVTLPEGYGSLSVAALRRLLPALKEDVVVYSEAVKRAGFDSHSALSLIEQTGELYQELPYYGEVLQRHVGFGSGDPNDSPERRFGKIANPTVHIGLNELRKIINALIKRYGNPAEVVVELARDLKLSREKRKEIQEEQKQRQDRNEKRIKDACEILGIDPLVIDRGKRREISQKMQLWDELNPKDAANRRCPYTGDQISIEKLLSAEVEIEHILPFSKTLDDSLNNKTVAMRRANRDKGNRTPYEAFGESLNPDYDYDAILQRASLMPREKRKRFASDGYQQWLRDDKDFLSRALNDTAYLSRIAKEYLTLICPPNSVRAIPGRMTAQLRAMFGLNRLLSEGGIKNREDHRHHAIDAAVIGVTDQGLLQKFSRASARTRELQLSRLVDDMPLPWDTYREHVTRALEHLVVSHKPDHGYQGKMHEDTAWGLRDNGQVTRRVRSEDGGPRQRLLENKNVVKINSTRDFSRHGIDEQGQVNAYKGYVGGSNYCIEIWIDEKGKWNSDVVSTFQAYQIVRELGEKAAWQKLRNPLLSLSAKPLVMRLIIDDVVKMQIAGQNKIMRVVKIAQNGQIFFAEHNEANVDARDKDKNNPFKYISKTAGSLQKAGGIHMAISPIGDARPVRYGR

SEQ ID NO: 239 - protein, 1397 aa, Unknown
  Description of Unknown: gamma proteobacterium HTCC5015 polypeptide
MTKNYISPIAIDLGAKFTGVALYQYLEGADCTQEVAKGLLVDDRGNVTWSQEGRRGKRHQVRGYKRRKMAKRLLWLILDSEYGIKREEVTEPLLKFINGLLNRRGYTYISEEVDEESMNVSPLPFSEMMPDYFNSSAPLLEQLAKLLSDKNKLVRFRAEGKIPSNKNEFKKLLDTALDGKYKDEKKELSEAWGNILIASENVLKSTVDGHKSRSEYLANIKEDIKSNEELEKQISSKEIDGFYNLVGHLSNFQLRLLRKYFNDPNMSGVSYWDEKRLEKYFYQWVQGWHTKGGTDEAEKKNIILKTKGAPLLKTLKSLSADLTIPPYEDQNNRRPPKCQSVLLSDEKLTMHYPKWKEWVGQLVKQNDNAYLNENVTLANALHRIVERSRSIDPYQLRLLISITDAEKRNDLAGYKRLKLSLGSEVDEFLLLVKNIVDETKEAREGLWFETENKLFFKCGKTPPRKEKLKSTLLSAVLGKNLSDDEQSSFIEEFWKSGTPKIERRNVRGWCRLASQVQKTYGVYLKEYGLQQLHKLEAGKKLDDKPLALLYKNSGLIASKIGEALNIEPDEVSRFASPHSLAQIFNIIEGDVAGFNKTCRACTYENIWRMQEEKVESLLTNQLLSEIHGERKVPLKSAMCTRLSADSTRPFDGQMASIIEHIARKIAQHKIAQINDVPKEFSIDIPIIIESNQFSFTAELEEIKRGRGSAKAKKAKELGEKSKAGWVSKTERIKTSSEGICPYTGAPLGGSGEIDHIIPRSLTGRTKKTVFNSEANLIYCSSKGNHDKGNRVYVIEQLNDKYLKKQFSTSDVNLIKKKIKTTIQRFTEGGEKLRSFSELSREDQKAFRHALFVPELKSEVTSLLAVKNITRVNGTQAWLAKKIASLLAEHLDKQGRDYTLSAHQIDPWSVSKQRKMLASAEPIWAKKDPQPAASHVVDAVCTFLEALEQPHTASRLKTISSTSFEKTGWRSALIPDLIKVDALDRRPKYRRYNIGSTSLFKDGIYAERFLPILIDENGLMAGYDIDNSLKAKGADVVFESLSPFLLFKGEEVGAQSLSDWQERIDGRYLYMSIDKVKAFDYLQEKVGEKDIAAELLNSIHFTQRKTELRAKFSDDSGKKMKTLDAIRKSLKLTVTVNEIGKRKEKCGFSGTIGIPAKSAWENLLDEPLLETYWGTKMPPQEIWEKVYRKHFPRNIPNQAHRKVRKDFSLPVVDSVSGGFRVKRKTPNGYNYQLLAIDGYSAVGFKKEGDNVDFKSPALVPQIAESKSVTPISSELVHLDKNEIVYFDEWRKIDISDSDLKQFVSSLELAPGSQNRFYIRFTVDEDQFERHFKSALRVNGIQDLDTVNKTFDWNREIPSLLIPPRSNLFLLETGQKITFEYIANGANAEVKKAYSLRRA

SEQ ID NO: 240 - protein, 1186 aa, Gardnerella vaginalis
  Gardnerella vaginalis 1500E
MEGNISYAIGIDVGLNSVGLAAIRLDNNGEPIRILKAMSVIHDAGIDPNGAKESDTRKAISGVARRVRRLYRQRRRRLQKLDFLLHSLGFPVVENKDLDFSDSFIPWIFRAKLADEYIADEKQRKQMLSVAIRHIARHRGWRNPYQSIKSMTQETEYSEFYNELLKNIEKFAPGVGCEGSTPAQLVRDYLLLQQGKASRRLRITTDEKRKNHPNSLNPILPRKLMQSDNMLEILNIFNVQHIDDKYVREQIINAVFYAKSPRGSAENRVGKDAITGKGKRALKASLAFQKYRIISTISNLRIRENSKERCLTIEEKQSVYKLLTTSTDESSKEKSAEAPLYTWIDVADCLGIERYKLRGVGSQIGDGESVGNRPPMLNSELAIIYANNKSLGKSLLTWWLDANRTQEDKEALIEILSNTVDIEAIHDNPEYQDKYGSAIAFIDSMDETEIAALENISLPDGRAAYSLETLDKLNKQMLETDDDLFEARKKLFNLPNNWRPSEAPIAEPTGNPSVDRVLKIVHRFLISAKNRWGNPERINIEHVRSGFKSKKMANSYKELLDKRTKGKENLKAMMRNSLHLGMSDSISDADIRRYEAVQRQNGQCLYCGSEITYHTCELDHIVPRKGPGSTNTRENLVATCSLCNAQKCNTPFSTWCEQSTYCKNHDISVDSAINRVRAFIFPPNSYDKRGANQFKKEVIARLKQKVGDEAFDNRSIESVAWMANELHRRIDWYYNSQNYQTNNGISDITNKAQTNVGVYAGSLTAIARRMSGIDGKLEFFDGRRKTRFDRRHHAVDASVIAMMTPGIAQILAIKCNLRETQLLQGNKVVPGGIDWKEYPTANDQGYQQYANWSVRMNALLKLLNEEMRADRIAVVNSIRLRYNNSSVHQYKVNALLKLHVGDEIDSGTIRRSSTPALYCALTRNPDYDVNNGLPENPNRAILLHDKKLNADDSITFFKAQAVQLFVREGSAEIGSSTHHLRIYEYFKKLKSGKIKKSYGMIRVFQNDLHRHIHEDLFSCDLPEQSISMRYADTEVAHAVQTGNSNYLGYLVPGDEIIVDFSHVKLSGNIGTFVEFLNKIGANCAAYNHWVVVGTDTEKVLILKPSMISSEGIDKLYSNCKRNNFDYSSYEKSINEILVGKGWRVSVNVLAKYNAETIRRNALGEVRWTSRSHLPISWSWNTGENRE

SEQ ID NO: 241 - protein, 1186 aa, Gardnerella vaginalis
  Gardnerella vaginalis 284V
MEGNISYAIGIDVGLNSVGLAAIRLDDYGEPIRILKAMSVIHDAGIDPNGAKESDTRKAISGVARRVRRLYRQRRRRLQKLDFLLQSLGWPVVENKDLDFSDSFIPWIFRAKLADEYIADEEQRKQMLSVAIRHIARHRGWRNPYQSIKSMMQETEYSEFYNELLKNIEKLAPGVGCEGSTPAQLVRDYLLSQQGKASRRLRITTGGRRKNHPHSLDPVLPRKLMQSDNMLEILNIFNVQHIDDKYVREQIINAVFYAESPRGSAENRVGKDAITGKGKRALKASLAFQKYRIISTISNLRIRENSKERCLTIEEKQNVYKLLTTSIDKSSKRKSAEAPLYTWIDVADCLGIERYKLRGVGSQIGDGESVGNRPPMLNSELAILYANNKSLGQSLITWWLASNRTQEDKEALIEILSNTVDIEAIHDNPEYQDKYGSAIAFIDSMNETEIAALENISLPDGRAAYSLETLDELNKQMLETDDDLFEARKKLFNLPNNWRPAEAPIAEPTGNPSVDRVLKIVHRFLISAKNRWGNPERINIEHVRSGFQSKKMANSYKELLDKRTEGKENLKAMMRNSLHLGTSDSISDADIRRYEAVQRQNGQCLYCGSEITYHTCELDHIVPRKGPGSTNTRENLVATCSSCNAQKCNTPFATWCEQSTYCKNHDISADSAINRVRAFIFPPNSYDKRGANQFKKEVIARLKQKVGDEAFDNRSIESVAWMANELHRRIDWYYNSQNYQTNNGISDISNKAQTNVGVYAGSLTAIARRMSGIDGKLEFFDGRRKTRFDRRHHAVDASVIAMMTPGIAQILAIKCNLRETQLLQGNKVVPGGIDWKEYPTANDQGYQQYANWSVRMNALLKLLNEEMRADRIAVVNSIRLRYSNSSVHQYEVNALLKLHVGDEIDSETIRRSSTPALYCALTRNPDYDVNNGFPENPGRTILLHNKKLNADDSITFFKAQAVQLFVREGSAKIGNSIHHLRIYEYFEKLKSGKIKKSYGMIRVFQNDLHRHIHEDLFSCDLPEQSISMRYADTKVAHAVQTGNANYLGYLVPGDEIIVDFSHITLSENIGKFVEFLNKIGADCTAYRHWVVVGTDTEKVLILKPSMISSEGIDKLYSNCERNNFDYSSYEKSINEILAGKGWRVSVNVLAQYKAATIRRNALGEVRWASRSHLPISWSWDTGENRE

SEQ ID NO: 242 - protein, 1186 aa, Gardnerella vaginalis
  Gardnerella vaginalis 5-1
MEGNISYAIGIDVGLNSVGLAAIRLDNNGEPIRILKAMSVIHDAGIDPNGAKESDTRKAISGVARRVRRLYRQRRRRLQKLDFLLHSLGFPVVENKDLDFSDSFTPWIFRAKLADEYIADEKQRKQMLSVAIRHIARHRGWRNPYQSIKSMTQETEYSEFYNELLKNIEKFAPGVSCEGSTPAQLVRDYLLSQQGKASRRLRITTDDRRKNHPNSLDPVLPRKLMQSDNMLEILNIFNVQHIDNKYVREQIINAVFYAKSPRGSAENRVGKDAITGKGKRALKASLAFQKYRIISTISNLRIRENSKERCLTIEEKQSVYKLLTTSTDEYSKEKSAEAPLYTWIDVADCLGIERYKLRGVGSQIEDGESVGNRPPMLNSELAILYANAKSLKQSLITWWLAANRTQEDKEAFIEILSNTVDIEAIHDNPEYQDKYGSVIAFIDSMDETEIAALENISLPNGRAAYSLETLDKLNKQMLETDDDLFEARKKLFNLPNNWRPSEAPIAEPTGNPSVDRVLKIVHRFLISAKNRWGNPERINIEHVRSGFQSKKMANSYKKLLDKRTEGKENLKAMMRNSLHLGTSDSISDADIRRYEAVQRQNGQCLYCGSEITYHTCELDHIVPRKGPGSTNTRENLVATCSSCNAQKCNTPFATWCEESTYCKNHDISVDSAINRVRAFIFPPNSYDKRGASQFKKEVIARLKQKVGDEAFDNRSIESVAWMANELHRRIDWYYNSQNYQTNNGISDITNKAQTNVGVYAGSLTAIARRMSGIDGKLEFFDGRRKTRFDRRHHAVDASVIAMMTPGIAQILAIKCNLRETQLLQGNKVVPGGIDWKEYPTANDQGYQQYANWSVRMNALLELLNEEMRADRIAVVNSIRLRYSNSSVHKDDVHALLKLHVGDEIDSETIRRASTPALYCALTRNPDYDVNNGLPENTDRTILLHDKKLNADDSITFFKSKAAQLFVREGSVEIGNSIHHLRIYEYFEKLKSGKVKKSYGMIRVFQDDLHRYIHEDLFSCDLPEQSISMRYADTKVAHAVQTGNANYLGYLVPGDEIIVDFSHVKLSGYIGEFVEFLNKIGANCAAYKHWVVAGTDDKTTLILKPSMISSEGIDKLYSNCERNNFDYASYEKSIDKILVDKGWRVSVNVLDQYKAATIRRNALGEPRWASRSHLPISWSWDTGENRE

SEQ ID NO: 243 - protein, 1392 aa, Gemella haemolysans
  Gemella haemolysans ATCC 10379
MANKTWYLGLDIGSASVGWAATDTGYKIIRKNKKRLWGVRLFEEAKTAEDRRGYRSSRRRLARRKWRLNLLEELFTSEVKKVDENFFLRLKESQYHYEDKTHKVPYAIFNDKDYTDKDYYKDYPTIYHLRSKLMTEENPDIRKVFLAIHHIIKNRGHFLLQGQSFKDGNLNNLIKELLELDILHVGFEVTEEVVDKIADISLEKKTSKDKLNDIKELYPKEKQLLEVFRLIFGGKTSLDKLFAIDEYKELDAAIKSVSFKEKIYEEVRHDYEQVLSNYIELLDLAKLVYDSIILSDIKKEGKTLSESKVELFEKHRDDLLKLKNLVKNDSKLSEDKKVELYALIFKEDKDKGTNYVNYIRKSEEGKGCNYEDFKKFLVKELAKLEESSVKTEIIKDLELEQFLPLQRTKDNSVVPYQIHKEELVKILDNAARYHSFLNEKDESGYNVREKVIQLLEFRIPYYVGPLNSSKKAKEGGFAWSVRNTGYENTPVTPWNYSKVIDESASAEKFITNLTNKCTYLKGEDVLPKSSLLYSEFALLNELNALKYDGNRISLEARNTIIEKLFKQQGKKVTKTSIKNLLKAEGYIDGKGEITGIDITVKNDLKSYRDFKKILGNKFNSEHVENIILWITLYGESRKLIKAKIESVYGEVYSKDEITKMSRLVYKDWGRFSRKLLTELVSKKLYNEETGECLNIIGAMRQNNILFMELLADRFDYSKQIVEFNKELQEDVTEIAPEILDDLYVSPAVKRSIWQTVRIVEELKKIIGCAPAKIFVETTRSNQEKKKPTDSRKKQLELAYKAVKKDVKELEKEIGTINFDVLNDRLSSVEPSKLKAKKLYLYYTQLGRCMYSEEPINISELFDNNKYDIDHIYPQSKIKDDSFTNTVLVKRESNAAKTDRYPLGSDIQTPSNRRFWKFLKEKGLISDEKYNRLVRTEEFSDEELSGFIARQLVETSQSVKAVASILGELNPETSICYSKAENVSSFRQNFGKIKKGDRDSKNNDQLIKVREINDYHHAKDAYLNVVVGNVYDTKFTRNVFNFIKDKKDGRKYSLNKVFYENVSDSKTVAWEMDKTIHQVEKVMNNNNIMVTRRTSEQKGGLFDATVYKAKVAAKAKDGVYYPLKTSNSVVKDVAKYGGYTSIGIAYYSIFEYTIVNKKGEEKITRIIPIPIYISQNIKDSTALIEFGKSQIFCRAYEKIKDFKLLYRKLCIGSKININNYQYYIGGKSDERFYYDSAIQVTLDKKSEKYLKILSKYQNWKKENKDGELWENITKENNIELYNKLVEKMNSEIFTKKKSNKYNELNSEEIRNNFIKISVEEQAKVLLEILNLLTNKKSIFDLKSIDIKAARGKISFNLTSLIQFSIIEQSITGFYEKEITIIGDKGNDMENNNS

SEQ ID NO: 244 - protein, 1385 aa, Gemella morbillorum
  Gemella morbillorum M424
MKNKTWYLGLGVGPTSIGWAATDSNYKLLRKNKKRLWGVRLFEEAKTAVDRRTFRAERRRLARRKWRISLLEELFAKEVSKNDPNFFLRLKESKYHFEDKSLMNEYILFNDKDYTDKDYYKEYPTIYHLRLSLTTEENPDIRKVYLAVHSMLKNRGHFLLQGQSFNDSNIDSVIKELLELETVKINFEVTDEVIHSLKKIALEKKNLSDKNNDVKKLYPKEKQLQEIFKLVFGGKTSLDKLYDIEEYKELDNSVKSISFKEKVYEEVRPDYEQILSNYIELLDLAKLVYDSIVLADIKKEGKTISESKVELYNKHKDDLANLKKLVKIDSKLSEDKKKEVYFTIFKEDKEKGTNYVNYTHRSQEGKSCSYEDFKKFLKKELEKLEDSPTKTTILEELDLETFLPLQRTKDNSVVPYQIHKEELVKILDNAAKYHSFLAEKDDSGYSTREKVVQLFEFRIPYYIGPLNAHHNTENGGYSWAIRKKGMESVPVTPWNFKDVIDESASAEAFVNNLKNKCAYLSGEDVLPKNSLLYSEYALLNELNALRYEGNRISVEARDVIVTKLFKEQGKKVTKKTIKELLKTEGFIDGKGEIVGIDNIVKNDLKSYRDFKKILADKFDKERVENIILWITLYGESRKLIKEKITKVYGDFYTVDEIEKMSRLTYKDWGILSRKLLTELVSEKLYNEETGECLNIIGAMRQGTILFMELLADKFDYMSQIKNHNKENKDDITEITPDILENLHASPAVKRSIWQTVRIVEELKTIIGCVPTKIFIETTKRNNAPYKVPTLNRNDLVTKYKTIREHEIFELEKELKNTLDFTLNKNRLINEEPSKLKATKLYLYYTQLGRCMYTGKKIDLGELFDNNNKYDIDHIYPQSKVKDGSFNNIVLVTKASNDMKADVFPLKSKFQTKENKIFWRFLKEKKLITEEKYNRLVRTEEFSNGELTGFITRQLVETSQAIKVISNVLRELNPETTICYSKAENVSSFRQSFGKIKEANRKAENNEKLIRVQEINDYYNAKDAYLSIVVGNVYDVKFTRNVHNFIKNNKDARRYSLNGLFYTDVKNANTIAWEMDKTVHVVEKTMNNNNILITRRTSEQKGALYDATLYKAKVAEKAKEGTYYPLKTTDSKIKDVGKYGGFTKIKIAYYSIFEYTLDGKKGKQKITRIVPIPIYISQNIKDDKALLEYAQTRLPGKDLKIKYRKLCIGSLVKINNFNYYIGGKTNNNFTFDSAVQVILDKDSESYIKELAKYLNWKKENKDGKLWESITEDKNIQLYDSLVKKMNTGIFIRKTPNKYTELLTLEVKNKFINIDIDEQVKLLLEILNLLTNKKFTSKLNEIGITASRGVCSFNLSNQSQFSIIEQSVTGVYEKEKLIIEKKKEGIL

SEQ ID NO: 245 - protein, 1003 aa, Gluconacetobacter diazotrophicus
MIDESLTFGIDLGIGSCGWAVLRRPSAFGRKGVIEGMGSWCFDVPETSKERTPTNQIRRSNRLLRRVIRRRRNRMAAIRRLLHAAGLLPSTDSDALKRPGHDPWELRARGLDKPLKPVEFAVVLGHIAKRRGFKSAAKRKATNISSDDKKMLTALEATRERLGRYRTVGEMFARDPDFASRRRNREGKYDRTTARDDLEHEVHALFAAQRRLGQGFASPELEEAFTASAFHQRPMQDSERLVGFCPFERTEKRAAKLTPSFERFRLLARLLNLRITTPDGERPLTVDEIALVTRDLGKTAKLSIKRVRTLIGLEDNQRFTTIRPEDEDRDIVARTGGAMTGTATLRKALGEALWTDMQERPEQLDAIVQVLSFFEANETITEKLREIGLTLAVLDVLLTALDAGVFAKFKGAAHISTKAARNLLPHLEQGRRYDEACTMAGYDHAASRLSHHGQIVAKTQFNALVTEIGESIANPIARKALIEGLKQIWAMRNHWGLPGSIHVELARDVGNSIEKRREIEKHIEKNTALRARERREVHDLLDLEDVNGDTLLRYRLWKEQGGKCLYTGKAIHIRQIAATDNSVQVDHILPWSRFGDDSFNNKTLCLASANQQKKRSTPYEWLSGQTGDAWNAFVQRIETNKELRGFKKRNYLLKNAKEAEEKFRSRNLNDTRYAARLFAEAVKLLYAFGERQEKGGNRRVFTRPGALTAALRQAWGVESLKKQDGKRINDDRHHALDALTVAAVDEAEIQRLTKSFHEWEQQGLGRPLRRVEPPWESFRADVEATYPEVFVARPERRRARGEGHAATIRQVKERECTPIVFERKAVSSLKEADLERIKDGERNEAIVEAIRSWIATGRPADAPPRSPRGDIITKIRLATTIKAAVPVRGGTAGRGEMVRADVFSKPNRRGKDEWYLVPVYPHQIMNRKAWPKPPMRSIVANKDEDEWTEVGPEHQFRFSLYPRSNIEIIRPSGEVIEGYFVGLHRNTGALIPTPVGPDSYVIA

SEQ ID NO: 246 - protein, 1050 aa, Gluconacetobacter diazotrophicus
MGENMIDESLTFGIDLGIGSCGWAVLRRPSAFGRKGVIEGMGSWCFDVPETSKERTPTNQIRRSNRLLRRVIRRRRNRMAAIRRLLHAAGLLPSTDSDALKRPGHDPWELRARGLDKPLKPVEFAVVLGHIAKRRGFKSAAKRKATNISSDDKKMLTALEATRERLGRYRTVGEMFARDPDFASRRRNREGKYDRTTARDDLEHEVHALFAAQRRLGQGFASPELEEAFTASAFHQRPMQDSERLVGFCPFERTEKRAAKLTPSFERFRLLARLLNLRITTPDGERPLTVDEIALVTRDLGKTAKLSIKRVRTLIGLEDNQRFTTIRPEDEDRDIVARTGGAMTGTATLRKALGEALWTDMQERPEQLDAIVQVLSFFEANETITEKLREIGLTLAVLDVLLTALDAGVFAKFKGAAHISTKAARNLLPHLEQGRRYDEACTMAGYDHAASRLSHHGQIVAKTQFNALVTEIGESIANPIARKALIEGLKQIWAMRNHWGLPGSIHVELARDVGNSIEKRREIEKHIEKNTALRARERREVHDLLDLEDVNGDTLLRYRLWKEQGGKCLYTGKAIHIRQIAATDNSVQVDHILPWSRFGDDSFNNKTLCLASANQQKKRSTPYEWLSGQTGDAWNAFVQRIETNKELRGFKKRNYLLKNAKEAEEKFRSRNLNDTRYAARLFAEAVKLLYAFGERQEKGGNRRVFTRPGALTAALRQAWGVESLKKQDGKRINDDRHHALDALTVAAVDEAEIQRLTKSFHEWEQQGLGRPLRRVEPPWESFRADVEATYPEVFVARPERRRARGEGHAATIRQVKERECTPIVFERKAVSSLKEADLERIKDGERNEAIVEAIRSWIATGRPADAPPRSPRGDIITKIRLATTIKAAVPVRGGTAGRGEMVRADVFSKPNRRGKDEWYLVPVYPHQIMNRKAWPKPPMRSIVANKDEDEWTEVGPEHQFRFSLYPRSNIEIIRPSGEVIEGYFVGLHRNTGALTISAHNDPKSIHSGIGTKTLLAISKYQVDRFGRKSPVRKEVRTWHGEACISPTPPG

SEQ ID NO: 247 - protein, 1371 aa, Gordonibacter pamelaeae
  Gordonibacter pamelaeae 7-10-1-b
MNLRNVESYQVGLDIGTGSVGWAVLDDNGDLCRFKGKPTWGSRVFPTAETAAEARVHRGQRRRYDRRRQRIDLLQRFFADEVAKVDPEFFIRLNQARLHPENRDPAHADYRWPLFNGSNFTEKDYYRQFPTIYHLRAHLLKSDEPADIRLVYLALHNIVKHRGNFLHQDNPSLSARNANVGDAVEALCLALDEWCGAHDVECACDEAALAEALGDASLRPGEKRERAEAALGVEKAHKKLAKAVSSAVVGYAAEFGHVFFAESEGSKFALSNDEKVEAYVCPDEGRDLFDAMRAVHSSYVLMGILSEAQGELLSVCKVGEYERYKRDLETLKSLVRAYGPERYDEFFCGPFYEGTRDYDPGKAQGYTKYNLGASKLSHEDFLKEVQKLLKDIGAQADERYADIERAIEAGAFLRRLKTSDNGTIPYQLHLEEMDAIIERQAAFYPFLAQEKDKLKSLVSFRIPYYVGPLTQKNAARDGKGEARFAWSSRKPGMEDARVYPWNWEDVIDKDQSAEDFIRRMTGTCTYLKGEPVLARCSLDYELFCVLNELAGARWTQDGDKSYRFDAADRLGIVEDLFKKRKRVTYEAAEKWLARTHGPESGKSAGGAYHVSGGQGEDAFESQLSSHYDFCKILGVDELSDADEAMAEDIILWNTVFEDRSILKRKIKLAYGDRLGDAQVRKLCQKRYTGWGRLSGELLRGLRSATDNGPKTIMDILLEGDPNHARRMGAAMNLMEILHDDLLEFQAKIDEHNRERALAVGGMSVDEVTGSPALRRGINQALRVVDEIAGIAGKPPAHIYVEVTRDEGARNKGRRTTSRYRALEAALSSIKAQCADVYAELKERDPRALDDERLTLYFMQCGKCMYSGDALDINKLQTYQVDHILPQSYVKDDSFENKVLVRPDTNQRKGDTLLLDERLIARMRGFWRTLRDAELIGEKKFNNLTRTSVSDEQMKKFVSRQLVETGQMVKQVQQLLQARYPESEVQPVKAGVSHQLRVGCALAKSREINDFHHAHDAYLACQVGRFVQYRHSAVYSEPVKMAAVVKQFIKKQAEDYRRTRELPGSDGFIVSSFMTPGFDVKTGEVFRDAWDAGAEIDRIRRCFDYKDCFISRMPEETHGAFWDATIYSPRAAGKTLSLPLKRGLDPRKYGSYSREQFAYFFVYEAVKPKKKQRVLEFAPVPVRVASALANDPDALEDYARELAEAEGLVFERIRRRKVYKYQQIIVGDSRLYVTGREEVRNARQLAFSQDETKLICRIEQGEECEEGELLDLFRSMQRKYLACAPRLARLMKVAEMEEGFIAATASGKREVLLSLTSIAAAHRNSIDLKPIGRKGSSGQMKITFSKELSTNGILFVDSSVTGMFERRCRLGL

SEQ ID NO: 248 - protein, 1054 aa, Haemophilus parainfluenzae
  Haemophilus parainfluenzae ATCC 33392
MENKNLNYILGLDLGIASVGWAVVEIDEKENPLRLIDVGVRTFERAEVPKTGESLALSRRLARSARRLTQRRVARLKKAKRLLKSENILLSTDERLPHQVWQLRVEGLDHKLERQEWAAVLLHLIKHRGYLSQRKNESKSENKELGALLSGVDNNHKLLQQATYRSPAELAVKKFEVEEGHIRNQQGAYTHTFSRLDLLAEMELLFSRQQHFGNPFASEKLLENLTALLMWQKPALSGEAILKMLGKCTFEDEYKAAKNTYSAERFVWITKLNNLRIQENGLERALNDNERLALMEQPYDKNRLFYSQVRSILKLSDEAIFKGLRYSGEDKKAIETKAVLMEMKAYHQIRKVLEGNNLKAEWAELKANPTLLDEIGTAFSLYKTDEDISAYLAGKLSQPVLNALLENLSFDKFIQLSLKALYKLLPLMQQGLRYDEACREIYGDHYGKKTEENHHFLPQIPADEIRNPVVLRTLTQARKVINGVVRLYGSPARIHIETGREVGKSYKDRRELEKRQEENRKQRENAIKEFKEYFPHFAGEPKAKDILKMRLYKQQNAKCLYSGKPIELHRLLEKGYVEVDHALPFSRTWDDSFNNKVLVLANENQNKGNLTPFEWLDGKHNSERWRAFKALVETSAFPYAKKQRILSQKLDEKGFIERNLNDTRYVARFLCNFIADNMHLTGEGKRKVFASNGQITALLRSRWGLAKSREDNDRHHALDAVVVACSTVAMQQKITRFVRFEAGDVFTGERIDRETGEIIPLHFPTPWQFFKQEVEIRIFSDNPKLELENRLPDRPQANHEFVQPLFVSRMPTRKMTGQGHMETVKSAKRLNEGISVIKMPLTKLKLKDLELMVNREREKDLYDTLKARLEAFNDDPAKAFAEPFIKKGGAIVKSVRVEQIQKSGVLVREGNGVADNASMVRVDVFTKGGKYFLVPIYTWQVAKGILPNKAATQYKDEEDWEVMDNSATFKFSLHPNDLVKLVTKKKTILGYFNGLNRATGNIDIKEHDLDKSKGKQGIFEGVGIKLALSFEKYQVDELGKNIRLCKPSKRQPVR

SEQ ID NO: 249 - protein, 1052 aa, Haemophilus sputorum
  Haemophilus sputorum CCUG 13788
MKNTSLNYVLGLDLGISSVGWAVVEIDEKENPLSLIDVGVRTFERAETQKGESLALARRLARSARRLTQRRVARLKKAKRLLKSENILLSTDECLPHQVWQLRVEGLERKLERQEWAAVLLHLIKHRGYLSQRKNESKSENKELGALLSGVANNHKLLQQTTYRTPAELAVKKFEVEEGHIRNQQGSYTHTFSRLDLLSEMELLFSRQQHFGNPFTSEKLLENLTALLMWQKPALSGDAILKMLGKCTFENEYKAAKHTYSAERFIWITKLNNLRIQENGLERALNDNERLALMKQPYEKAKLTYAQVRSILNLSDEAIFKGLRYSGEDKKTSETKTVLMEMKAYHQIRLALEKNDLKTEWAELKVNSSLLDEIGTAFSLYKTDEDISTCLAGKLSQPVLNALLENLNFDKFIQLSLKALHKILPLMQQGLRYDEACAEIYGDHYGKKTEENHLLLPQIPADEIRNPVVLRTLTQARKVINGVVRLYSSPARIHIETGREVGKSYQDRRELEKRQEENRKQREKAISEIKTLFPNFSGEPKAKDILKMRLYYQQNAKCLYSGKPLELHRLLEQGYVEIDHALPFSRTWDDSFNNKVLVLANENQNKGNLTPFEWLDGKNNSERWKAFKALVETSAFPYTKKQRILSQKLDEKGFIERNLNDTRYVARFLCNFIADNMHLTGEGKRKVFASNGQITALLRGRWGLAKSREDNDRHHALDAVVVACSTVSMQQKITRFVRFEEGNVFTGERIDRETGEIIPLHFPAPWKFFREEVEIRIFSDNPKLELENRLIARPQANHEFVQPLFVSRMPTRKMIGQGHMETIKSAKRLNEGLSVIKMLLTKLRLKDLESMVNREREKELYEALKARLEAFNDEPAKAFAEPFMKKGGAIVKSVRVEQVQKSGVLVRDGNGVADNASMVRVDVFTKGGKYFLVPIYTWQVAKGILPNKAVIQGKNEEDWEVMDDATFRFSLHQNDLVKLVTKKKTIFGYFNGLNRATGNIDIKEHDLEKSKVKDGIHQSIGIKLALSFEKYQVDELGKNIRLCKSSKRQAVR

SEQ ID NO: 250 - protein, 1052 aa, Haemophilus parainfluenzae
MENKNLHYILGLDLGIASVGWAVVEIDEKENPLRLIDVGVRTFERAETQKGESLALSRRSARSARRLTQRRVARLKKAKRLLKSENILLSTDERLPHQVWQLRVEGLDRKLERQEWAAVLLHLIKHRGYLSQRKNESKSENKELGALLSGVASNHELLQQATYRTPAELAVKKFEVEEGHIRNQQGAYTHTFSRLDLLAEMELLFSRQQHFGNPFASEKLLENLTALLMWQKPALSGEDILKMLGKCTFEDEYKAAKNTYTAERFVWITKLNNLRIQENGLERALSDNERLMLIEQPYEKAKLTYAQVRSILNLSDDAIFKGVRYSGEDKKAIETKTTLMEMKAYHQIRKVLEGNNLKAEWVALKANPTLLDEIGTAFSLYKTDEDISAYLAGKLSQPVLNALLENLSFDKFIQLSLKALYKLLPLMQQGLRYDEACREIYGDHYGKKTEETHHFLPQIPADEIRNPVVLRTLTQARKVINGVVRLYGSPARIHIETGREVGKSYKDRHELKKRQEENRKQREKTISEIKTLFPNFSGEPKGKDILKMRLYYQQNAKCLYSGKPLELHRLFEQKYVEVDHALPLSRTWDDSFNNKVLVLANENQNKGNLTPFEWLDGKNNSERWRTFKALVETSAFPYAKKQRILSQKLDEKGFIERNLNDTRYVARFLCNFIADNMHLTGEGKRKVFASNGQITALLRRRWGLAKSREDNDRHHALDAVLVACSTVAMQQKITRFVRFKAGDVFTGERIDRETGEIIPLHFPTPWQFFKQEVEIRIFSDNPKLELENRLPDRPQANHEFVQPLFVSRMPTRKMTGQGHMETVKSAKRLNEGISMIKMPLTKLKLKDLELMVNREREKDLYDALKTRLEAFNDDPAKAFAEPFMKKGGAIVKSVRVEQVQKSGVLVRQGNGVADNASMVRVDVFTKDGKYFLVPIYTWQVAKGILPNKAVIQGKDEEDWEDIDDATFQFSLHPNDLISVKTKKDEFLGYFNGLNRHTGGINIRTHDLEKSKGKQGIFEGIGVKIALSFEKYQIDELGKNIRLCKPSKRQPVR

SEQ ID NO: 251 - protein, 1052 aa, Haemophilus sputorum
  Haemophilus sputorum HK 2154
MKNTSLNYVLGLDLGISSVGWAVVEIDEKENPLSLIDVGVRTFERAETQKGESLALARRLARSARRLTQRRVARLKKAKRLLKSENILLSTDECLPHQVWQLRVEGLERKLERQEWAAVLLHLIKHRGYLSQRKNESKSENKELGALLSGVANNHKLLQQTTYRTPAELAVKKFEVEEGHIRNQQGSYTHTFSRLDLLSEMELLFSRQQHFGNPFTSEKLLENLTALLMWQKPALSGDAILKMLGKCTFENEYKAAKHTYSAERFIWITKLNNLRIQENGLERALNDNERLALMKQPYEKAKLTYAQVRSILNLSDEAIFKGLRYSGEDKKTSETKTVLMEMKAYHQIRLALEKNDLKTEWAELKVNSSLLDEIGTAFSLYKTDEDISTCLAGKLSQPVLNALLENLNFDKFIQLSLKALHKILPLMQQGLRYDEACAEIYGDHYGKKTEENHLLLPQIPADEIRNPVVLRTLTQARKVINGVVRLYSSPARIHIETGREVGKSYQDRRELEKRQEENRKQREKAISEIKTLFPNFSGEPKAKDILKMRLYYQQNAKCLYSGKPLELHRLLEQGYVEIDHALPFSRTWDDSFNNKVLVLANENQNKGNLTPFEWLDGKNNSERWKAFKALVETSAFPYTKKQRILSQKLDEKGFIERNLNDTRYVARFLCNFIADNMHLTGEGKRKVFASNGQITALLRGRWGLAKSREDNDRHHALDAVVVACSTVSMQQKITRFVRFEEGNVFTGERIDRETGEIIPLHFPAPWKFFREEVEIRIFSDNPKLELENRLIARPQANHEFVQPLFVSRMPTRKMTGQGHMETIKSAKRLNEGLSVIKMLLTKLRLKDLESMVNREREKELYEALKARLEAFNDEPAKAFAEPFMKKGGAIVKSVRVEQVQKSGVLVRDGNGVADNASMVRVDVFTKGGKYFLVPIYTWQVAKGILPNKAVIQGKNEEDWEVMDDATFRFSLHQNDLVKLVTKKKTIFGYFNGLNRATGNIDIKEHDLEKSKVKDGIHQSIGIKLALSFEKYQVDELGKNIRLCKSSKRQAVR

SEQ ID NO: 252 - protein, 1338 aa, Helcococcus kunzii
  Helcococcus kunzii ATCC 51366
MQDYYLGLDIGTNSVGWAVTDENYNLLRKKGKDLWGVRLFKEAQPATERRGHRSSRRRTIRKSLRKQLLRELFEEEINAIDKDFFLRLDESKYWLEDKKIEGKYSLFNDENFTDKDYYEKFPTIFHLRKALIESDDKEDIRLYFLAINQMMKRRGHFLIDGKLSNVEDITPFKECIQNLINEELDTEIETEFYDKAIKIVSDYSLKKTEKKNLIKDLVKETDSIEDSKKIINIFNLLISGKSKVNGIFDDEEILEKIKEDNKEDFYLTSEKYEENLEYFSQLLDYRFELISSLKSIYDYIILQEVLKGKKYLSYAQVERYKNHKEDLRKLKQLIKKYDKNGKIYYQIFRDENFKKGYVAYLGYYKKNKKNVPVKKCDYDTFSKNIKSTLDKICDKEDPLYIELIDKIEKGGFLLKQIVSTNSVIPHQVHELELDKILENLEKNYPSFKEISDGVSKIDKIKMIFNFRIPYYVGPLNDYHKDKVNSNTWIVKNEGFENENIRPWNFSKIVDEHACEEEFIKRMINECSYIPGEKVLPKSSLLYSEYMVLNELNNLRVNGDKLNPKIKKEIVENIYKKERKVTLKKIRNFLIINNYVDSKVEFSGLSDGIKANMSSYIDFAEILDDNFDNNMVEDLIEQITIHVGNVKLLTEKISNKYPNLEKKQINKIVNLKFKDWARFSRKLLVGIEGTEKETGEINTIIGFLRETNENFMELMSNRYTFSEEISEIKKKYIPNKLSKQIVDDLYVSPAVKKMIWQVLNINDELIKVLGKQPKKIFIEMARGKEEKPEVKDSRKNKLIELYKNLGKEGKEWLNRIEDKTEADFRNRALYLYYTQMGRCMYTGEIIDIERLYDKELYDLDHIIPRKMKKDDSIHKNLVLVTRNSNQYEKKDNYPVPEVIKSRENVRHLWYALKKKGLITEEKYNRLTRINPLSDKELSEFIERQLVETRQTTKVVKDLFENYYTDSKIVTVKAGLVSELRRDFEVLKCREINDLNHAHDAFLNIIVGDVWSKKFTSNPYNFVKKNREKYTLNNIFTKNQKDLRGNEIWNCAEGKKRIIKTLNKPSVLFSVENFEQTGQLFDQNIIGKQDYKEKTSYVPIKGDERLQDISKYGGYRGISGAYFFIVEHTEKNKRVKTIESLPIYMKSYVEENGLLDFCTNEMKLVDPKIIVKKLNYKSEIIVDGFKYLISGKTENRLSLETNEYLYWNHTQTTDIKKILNINEKIELEKYNGDIESERENIIKYIQIILEKFKLKPFIKRRNLPNIEINFADYETEKLLQLLVNLIPLTTKYVSPVDLTVISGSKYAGKVLIPKKISNLNEVIFISKSITGIYESRRRII

SEQ ID NO: 253 - protein, 1007 aa, Helicobacter canadensis
  Helicobacter canadensis MIT 98-5491
MKVLGFDIGINSIGWAFVENNELKDCGVRLFTKAENPKTKESLALPRRNARSSRVRLRRRRSRLLSLKHIISKEFGLHYEDYIALDGNLPKAYTGKIESIYKLRYEALSQAISKEDLARVILHIAKHRGYMNKNQKTSQDSEKGAILSAIKENSNKIKHYQTAGEYFYKELFENLRDGTKEFKNIRNKAMKNEKTGNMESTYYNTILASDLEKELKLILEKQQAYHNYSDTFIKEVLEIAFYQRPLKDFSHLVGSCTFYENEKRACKNSYSAWEFIALGKIINTLESIKKDTGEIFSNEIITQILKEVLDKGSLSYTKLRKMINLDEKVKFKGLKYDKEGVEKTNLIEFKKLKEFKKALGEHNLERKTLDEIATHITLTKDENQLKKQLEQYALSQNQIDALAELDFNDHINLSFKALYEILPLMEKGKRYDEACNELGLKAKTSNQKSEFLPAFCDSIFAQELTNPIVNRAISEYRKVLNRLLKKYGKMHKIHIELARDAGLSKEARNKIEKEQKENKDINDKAEKTCKEFGLKPNAKNILKIKLWREQGEICAYSGKKITIDDLKEDKALEVDHIYPYSRSYDDSYNNKVLVFIKENQLKLNQTPYEAFGSNQEKWSKIQVLAQKLPYKKKNRILDENFKNKDQIEFISRNLNDTRYATSLIAKYTKEYLEFLPLSDDEDISLKSGEKGSKTHVQTMNGMLTSVLRHAWGFSQKDRNNHLHHALDAIIIAYSTNSIIKAFSDFKKNQEILKAKLYAKKLTSEEYKNQSKFTGFEKYRSKILEKLDSIFVSKPPNKNTKGALHEQTFYSYQDILEEYKTQEGLKRALECGKVRKIGTKYVVNDRMVRLDIFKKDNKFYGIPIYTMDFALGVLPNKVVTIGTDKDKIKKEWKTIDETYEFCFSLYKGDLVLIQKKEMQESEFAYYNGFDISSASISLEKHDNKFENLTENQKLLFPKAKEGDVEVRGIGIQGLKVFKKYMVTPLGEIQETRTEARQNIQPRKKHGLR

SEQ ID NO: 254 - protein, 1023 aa, Helicobacter cinaedi
  Helicobacter cinaedi CCUG 18818 = ATCC BAA-847
MKIYSFDIGVASIGWAFIENEVLQDCGIRIFTKAENPKNGASLALPRREARGVRKRLARRRGRLNTIKQLLCKEFGLQLEDYLSNDGELPKAYTASKANPLKSPYELRTLALSQKLDSKDLVRVILHIAKHRGYGNKHAKDSKDTESGKVKKAIEFNRKTLAEKGYRSVGEYLYREFFQQSRISQNNGATEFINVRNKAGNYEHCVAQDMLKEELESILNAQRQFGFSLKQDFESKLLTKIFEQRPLKSFADKVGNCCFIAGEKRAPKDSPSAIEFIALSRTINTLINLSKESGEIYNRAIILQIVESTLKKGEISYKELREIIRLDERLRFKDPRLDYSREIKEAEKVKFLEFKQLKGFKKALGESFTTLAISQLDEIAEHIALIKDRVKLNEKLESYALTKEQREALSNLSFSAHINLSLQALKQILPFMRGDNGEQCLDYDESVEKAGLKALSKDTLKGQMLPPLNEFEPYLSNPVVARALAEYRKVLNVLLKQYGSPHKIHIEYAREAKLSSTERQKYEKEQKDNYAANQAAHKKCQELGLEPSSTNLLKLKLWQEQGGLCLYSGAKITISYLQDPTALQVDHIYPYSRSFDDSYMNKCLVLTKANQEKGNRTPFEAFGTDSAKWGVITTLAQKLPHKKRRRILNTAFNDKEAGFKLRNLNDTSYIARLVADYTETYLEFLPLVESENTTLSKGQKGSKKHIAIVNGVLTSTMRYYLGFASKDRDNHLHHALDAVIIGFMNDSVIKAFSDFKKTQETSKAAYYAHTLSKQEYKKQRAFIQLPSGENFRVSVLEKVESVFVSKPPRKRVRGALHEATFYSPNDPKLLKNYGGTKGVERALALGKMRKVGAKIVSNGAMVRVDIFRHKSSGKFYGVPVYTMDFALGILPNKAVVVGKDQNGVIKDWLEMDSSYEFIFSLYKDDVILVQKKEMQRPELCYFVSFDTSGASIKVAKHDNNFSTLTENQKLLFSNATKEEVVGKSIGIQNLKVFEKWQVSVLGEVKRTQSYPRENISLASKAKK

SEQ ID NO: 255 - protein, 1023 aa, Helicobacter cinaedi
  Helicobacter cinaedi CCUG 18818
MKIYSFDIGVASIGWAFIENEVLQDCGIRIFTKAENPKNGASLALPRREARGVRKRLARRRGRLNTIKQLLCKEFGLQLEDYLSNDGELPKAYTASKANPLKSPYELRTLALSQKLDSKDLVRVILHIAKHRGYGNKHAKDSKDTESGKVKKAIEFNRKTLAEKGYRSVGEYLYREFFQQSRISQNNGATEFINVRNKAGNYEHCVAQDMLKEELESILNAQRQFGFSLKQDFENKLLTKIFEQRPLKSFADKVGNCCFIAGEKRAPKDSPSAIEFIALSRTINTLINLSKESGEIYNRAIILQIVESTLKKGEISYKELREIIRLDERLRFKDPRLDYSREIKEAEKVKFLEFKQLKGFKKALGESFTTLAISQLDEIAEHIALIKDRVKLNEKLESYALTKEQREALSNLSFSAHINLSLQALKQILPFMRGDNGEQCLDYDESVEKAGLKALSKDTLKGQMLPPLNEFEPYLSNPVVARALAEYRKVLNVLLKQYGSPHKIHIEYAREAKLSSTERQKYEKEQKDNYAANQAAHKKCQELGLEPSSTNLLKLKLWQEQGGLCLYSGAKITISYLQDPTALQVDHIYPYSRSFDDSYMNKCLVLTKANQEKGNRTPFEAFGTDSAKWGVITTLAQKLPHKKRRRILNTAFNDKEAGFKLRNLNDTSYIARLVADYTETYLEFLPLVESENTTLSKGQKGSKKHIAIVNGVLTSTMRYYLGFASKDRDNHLHHALDAVIIGFMNDSVIKAFSDFKKTQETSKAAYYAHTLSKQEYKKQRAFIQLPSGENFRVSVLEKVESVFVSKPPRKRVRGALHEATFYSPNDPKLLKNYGGTKGVERALALGKMRKVGAKIVSNGAMVRVDIFRHKSSGKFYGVPVYTMDFALGILPNKAVVVGKDQNGVIKDWLEMDSSYEFIFSLYKDDVILVQKKEMQRPELCYFVSFDTSGASIKVAKHDNNFSTLTENQKLLFSNATKEEVVGKSIGIQNLKVFEKWQVSVLGEVKRTQSYPRENISLASKAKK

SEQ ID NO: 256 - protein, 1023 aa, Helicobacter cinaedi
MKIYSFDIGVASIGWAFIENEVLQDCGIRIFTKAENPKNGASLALPRREARGVRKRLARRRGRLNTIKQLLCKEFGLQLEDYLSNDGELPKAYTASKANPLKSPYELRTLALSQKLDSKDLVRVILHIAKHRGYGNKHAKDSKDTESGKVKKAIEFNRKTLAEKGYRSVGEYLYREFFQQSRISQNNGATEFINVRNKAGNYEHCVAQDMLKEELESILNAQRQFGFSLKQDFENKLLTKIFEQRPLKSFADKVGNCCFIAGEKRTPKDSLSAIEFIALSRTINTLINLSKESGEIYNRAIILQIVESTLKKGEISYKELREIIRLDERLRFKDPRLDYSREIKEAEKVKFLEFKQLKGFKKALGESFTTLARSQLDEIAEHIALIKDRVKLNEKLESYALTKEQREALSNLSFSAHINLSLQALKQILPFMRGDNGEQCLDYDESVEKAGLKALSKDTLKGQMLPPLNEFEPYLSNPVVARALAEYRKVLNALLKQYGSPHKIHIEYAREAKLSSTERQKYEKEQKDNYAANQAAHKKCQELGLEPSSTNLLKLKLWQEQGGLCLYSGAKITISYLQDPTALQVDHIYPYSRSFDDSYMNKCLVLTKANQEKGNRTPFEAFGTDSAKWGVITTLAQKLPHKKRRRILNTAFNDKEAGFKLRNLNDTSYIARLVADYTETYLEFLPLVESENTTLGKGQKGSKKHIAIVNGALTSTMRYYLGFASKDRDNHLHHALDAVIIGFMNDSVIKAFSDFKKTQETSKAAYYAHTLSKQEYKKQRAFIQLPSGENFRASVLEKVESVFVSKPPRKRVRGALHEATFYSPNDPKLLKNYGGTKGVERALALGKMRKVGAKIVSNGAMVRVDIFRHKSSGKFYGVPVYTMDFALGILPNKAVVVGKDKNGVIKDWLEMDSSYEFIFSLYKDDLLLVQKKEMAEPELCYFMSFNSSIAQISVAKHDNNFSTLTKNQKLLFSNATQEDVSGKSIGIQNLQVFEKWQVSVLGEVKRTQSYPRENISLASKAKK

SEQ ID NO: 257 - protein, 1024 aa, Helicobacter mustelae
MIRTLGIDIGIASIGWAVIEGEYTDKGLENKEIVASGVRVFTKAENPKNKESLALPRTLARSARRRNARKKGRIQQVKHYLSKALGLDLECFVQGEKLATLFQTSKDFLSPWELRERALYRVLDKEELARVILHIAKRRGYDDITYGVEDNDSGKIKKAIAENSKRIKEEQCKTIGEMMYKLYFQKSLNVRNKKESYNRCVGRSELREELKTIFQIQQELKSPWVNEELIYKLLGNPDAQSKQEREGLIFYQRPLKGFGDKIGKCSHIKKGENSPYRACKHAPSAEEFVALTKSINFLKNLTNRHGLCFSQEDMCVYLGKILQEAQKNEKGLTYSKLKLLLDLPSDFEFLGLDYSGKNPEKAVFLSLPSTFKLNKITQDRKTQDKIANILGANKDWEAILKELESLQLSKEQIQTIKDAKLNFSKHINLSLEALYHLLPLMREGKRYDEGVEILQERGIFSKPQPKNRQLLPPLSELAKEESYFDIPNPVLRRALSEFRKVVNALLEKYGGFHYFHIELTRDVCKAKSARMQLEKINKKNKSENDAASQLLEVLGLPNTYNNRLKCKLWKQQEEYCLYSGEKITIDHLKDQRALQIDHAFPLSRSLDDSQSNKVLCLTSSNQEKSNKTPYEWLGSDEKKWDMYVGRVYSSNFSPSKKRKLTQKNFKERNEEDFLARNLVDTGYIGRVTKEYIKHSLSFLPLPDGKKEHIRIISGSMTSTMRSFWGVQEKNRDHHLHHAQDAIIIACIEPSMIQKYTTYLKDKETHRLKSHQKAQILREGDHKLSLRWPMSNFKDKIQESIQNIIPSHHVSHKVTGELHQETVRTKEFYYQAFGGEEGVKKALKFGKIREINQGIVDNGAMVRVDIFKSKDKGKFYAVPIYTYDFAIGKLPNKAIVQGKKNGIIKDWLEMDENYEFCFSLFKNDCIKIQTKEMQEAVLAIYKSTNSAKATIELEHLSKYALKNEDEEKMFTDTDKEKNKTMTRESCGIQGLKVFQKVKLSVLGEVLEHKPRNRQNIALKTTPKHV

SEQ ID NO: 258 - protein, 1688 aa, Ignavibacterium album
MEFKKVLGLDIGTNSIGCALLSLPKSIQDYGKGGRLEWLTSRVIPLDADYMKAFIDGKNGLPQVITPAGKRRQKRGSRRLKHRYKLRRSRLIRVFKTLNWLPEDFPLDNPKRIKETISTEGKFSFRISDYVPISDESYREFYREFGYPENEIEQVIEEINFRRKTKGKNKNPMIKLLPEDWVVYYLRKKALIKPTTKEELIRIIYLFNQRRGFKSSRKDLTETAILDYDEFAKRLAEKEKYSAENYETKFVSITKVKEVVELKTDGRKGKKRFKVILEDSRIEPYEIERKEKPDWEGKEYTFLVTQKLEKGKFKQNKPDLPKEEDWALCTTALDNRMGSKHPGEFFFDELLKAFKEKRGYKIRQYPVNRWRYKKELEFIWTKQCQLNPELNNLNINKEILRKLATVLYPSQSKFFGPKIKEFENSDVLHIISEDIIYYQRDLKSQKSLISECRYEKRKGIDGEIYGLKCIPKSSPLYQEFRIWQDIHNIKVIRKESEVNGKKKINIDETQLYINENIKEKLFELFNSKDSLSEKDILELISLNIINSGIKISKKEEETTHRINLFANRKELKGNETKSRYRKVFKKLGFDGEYILNHPSKLNRLWHSDYSNDYADKEKTEKSILSSLGWKNRNGKWEKSKNYDVFNLPLEVAKAIANLPPLKKEYGSYSALAIRKMLVVMRDGKYWQHPDQIAKDQENTSLMLFDKNLIQLTNNQRKVLNKYLLTLAEVQKRSTLIKQKLNEIEHNPYKLELVSDQDLEKQVLKSFLEKKNESDYLKGLKTYQAGYLIYGKHSEKDVPIVNSPDELGEYIRKKLPNNSLRNPIVEQVIRETIFIVRDVWKSFGIIDEIHIELGRELKNNSEERKKTSESQEKNFQEKERARKLLKELLNSSNFEHYDENGNKIFSSFTVNPNPDSPLDIEKFRIWKNQSGLTDEELNKKLKDEKIPTEIEVKKYILWLTQKCRSPYTGKIIPLSKLFDSNVYEIEHIIPRSKMKNDSTNNLVICELGVNKAKGDRLAANFISESNGKCKFGEVEYTLLKYGDYLQYCKDTFKYQKAKYKNLLATEPPEDFIERQINDTRYIGRKLAELLTPVVKDSKNIIFTIGSITSELKITWGLNGVWKDILRPRFKRLESIINKKLIFQDEDDPNKYHFDLSINPQLDKEGLKRLDHRHHALDATIIAATTREHVRYLNSLNAADNDEEKREYFLSLCNHKIRDFKLPWENFTSEVKSKLLSCVVSYKESKPILSDPFNKYLKWEYKNGKWQKVFAIQIKNDRWKAVRRSMFKEPIGTVWIKKIKEVSLKEAIKIQAIWEEVKNDPVRKKKEKYIYDDYAQKVIAKIVQELGLSSSMRKQDDEKLNKFINEAKVSAGVNKNLNTTNKTIYNLEGRFYEKIKVAEYVLYKAKRMPLNKKEYIEKLSLQKMFNDLPNFILEKSILDNYPEILKELESDNKYIIEPHKKNNPVNRLLLEHILEYHNNPKEAFSTEGLEKLNKKAINKIGKPIKYITRLDGDINEEEIFRGAVFETDKGSNVYFVMYENNQTKDREFLKPNPSISVLKAIEHKNKIDFFAPNRLGFSRIILSPGDLVYVPTNDQYVLIKDNSSNETIINWDDNEFISNRIYQVKKFTGNSCYFLKNDIASLILSYSASNGVGEFGSQNISEYSVDDPPIRIKDVCIKIRVDRLGNVRPL

SEQ ID NO: 259 - protein, 1092 aa, Ilyobacter polytropus
MKYSIGLDIGIASVGWSVINKDKERIEDMGVRIFQKAENPKDGSSLASSRREKRGSRRRNRRKKHRLDRIKNILCESGLVKKNEIEKIYKNAYLKSPWELRAKSLEAKISNKEIAQILLHIAKRRGFKSFRKTDRNADDTGKLLSGIQENKKIMEEKGYLTIGDMVAKDPKFNTHVRNKAGSYLFSFSRKLLEDEVRKIQAKQKELGNTHFTDDVLEKYIEVFNSQRNFDEGPSKPSPYYSEIGQIAKMIGNCTFESSEKRTAKNTWSGERFVFLQKLNNFRIVGLSGKRPLTEEERDIVEKEVYLKKEVRYEKLRKILYLKEEERFGDLNYSKDEKQDKKTEKTKFISLIGNYTIKKLNLSEKLKSEIEEDKSKLDKIIEILTFNKSDKTIESNLKKLELSREDIEILLSEEFSGTLNLSLKAIKKILPYLEKGLSYNEACEKADYDYKNNGIKFKRGELLPVVDKDLIANPVVLRAISQTRKVVNAIIRKYGTPHTIHVEVARDLAKSYDDRQTIIKENKKRELENEKTKKFISEEFGIKNVKGKLLLKYRLYQEQEGRCAYSRKELSLSEVILDESMTDIDHIIPYSRSMDDSYSNKVLVLSGENRKKSNLLPKEYFDRQGRDWDTFVLNVKAMKIHPRKKSNLLKEKFTREDNKDWKSRALNDTRYISRFVANYLENALEYRDDSPKKRVFMIPGQLTAQLRARWRLNKVRENGDLHHALDAAVVAVTDQKAINNISNISRYKELKNCKDVIPSIEYHADEETGEVYFEEVKDTRFPMPWSGFDLELQKRLESENPREEFYNLLSDKRYLGWFNYEEGFIEKLRPVFVSRMPNRGVKGQAHQETIRSSKKISNQIAVSKKPLNSIKLKDLEKMQGRDTDRKLYEALKNRLEEYDDKPEKAFAEPFYKPTNSGKRGPLVRGIKVEEKQNVGVYVNGGQASNGSMVRIDVFRKNGKFYTVPIYVHQTLLKELPNRAINGKPYKDWDLIDGSFEFLYSFYPNDLIEIEFGKSKSIKNDNKLTKTEIPEVNLSEVLGYYRGMDTSTGAATIDTQDGKIQMRIGIKTVKNIKKYQVDVLGNVYKVKREKRQTF

SEQ ID NO: 260 - protein, 1354 aa, Indibacter alkaliphilus
  Indibacter alkaliphilus LW1
MKKILGLDLGTTSIGWAFIKEPEKDVVGSEIVDMGVRIVPLSSDEENDFAKGNTISINADRTLKRGARRNLQRFKQRRNALLETFKEKNLIPSNFQYAEDGPSSTFSTLKLRDKAAKEKIELDDFVKVLLQINKKRGYKSSRKAMSEEDEGTAIDSMGIAKELYENDLTPGQWVYEALKNGRKNVPDFYRSDLQEEFKKIVNYQSEFYPDILNTSFVEDWMGKASTPTKQYFNKRGVQLAENKGKREERRLQEYKWRAEAVNFKIDLSEIALILSQINSQISNSSGYLGAISDRSKELYFKNLTVGQYLYQQVKKNPHTRLKGQVFYRQDYLDEFEKIWSVQSSFYPQLNDELKQEVRDVTIFFQRRLKSQKHLISNCEFEEHHKVVPKSHPIFQEFRIWQNLNNLTLIKKDNLNEKCELALEDKTALANELAFKKELSVKDALKVLGLKPSDWEFNFTKIEGNRTNHAFFEAFAKIIELEDGEPIDLGNLKADDILDQFSEAFLRIGIDTELLQVNSDIEGAEYEKQSYIQFWHLLYSSEDDQKLKQNLIRKFGFKPEHAKILASISLQDDHASLSSRAIKKILPHLQSGLIYDKACTYAGYNHSSSFTKDENEKRELRAELELLKKNSLRNPVVEKILNQMINVVNAILKDPNLGRPDEIRVEMARELKANAEQRKNMTSNIASATRDHEKYREILKKEFGLKRVTKNDLLRYKLWLETDGISLYTGKPIEASKLFSKEYDIEHIIPKARLFDDSFSNKTICERQLNIDKANVTAFSFLQNKLSADEFEQYQSRVKSLYGKLSKAKIQKLLMANDKIPEDFIARQLQETRYISKKAKEILFEITMRVSVTTGTITDKLREDWGLVEIMKELNWEKYDKLGLTYTIEGKHGERLNKIKDWNKRNDHRHHAMDALTVALTKPAYIQYLNNLNAKAIGNKKGTEIFAIEQKYLKRENGKLCFIPPIENIRAEAKKHLSKILVSYKAKNKVVTINKNKTKKKAGFNEQTALTPRGQLHKETVYGKSFHYSTKFEKIGASFDAQKINTVAKKEEREALLKRLAENGNDPKKAFTGKNSLNKMPIYLDLGKNIKLSEKVKTVVLEQNYTIRKNIDPDLKVDKVIDVGIKRILESRLEEFGGNAKLAFSNLEENPIWLNKEKGIPIKRVKISGVSNVESLHVKKDHFGEKILDEEGNEIPVDFVSTGNNHHVAIYEDEDGNLQDEVVNFYEAVIRRNQGESIIKYRHEEGWNFLYSIKQNEFFVFPSQDFNPNDFDLLDPKNYDLISPNLYRAQKFSKVMYGNSAVRDYVFRHHLETVLNDVKELKDVAYKQLKSLQYLNGIKKVRLNHLGQIIQVGEY

SEQ ID NO: 261 - protein, 1397 aa, Joostella marina
  Joostella marina DSM 19592
MKKVLGLDLGTNSIGWALVNEATKEEKKEGKSSEIIKLGVRVNPLTVDEKTNFEKGRPLSTNADRTLKRSARRNLQRYKLRRRNLIEILIKNGFITKDTPLTETGKDTTHQTLKLRAKSAKEKVDLKDFAKILLTINKKRGYKSSRKVNSDEDGLAIDGMAVAKHLYEQNLTPGQYVLNLLQKNKKYVPDFYRSDLQEEFKNIWNNQKTYYFDILTDTLFEELKDKNKSQTWAICKKPFDIAGIKQIGKASDKRLERYKWRTEGLTQKLNLEYLAIALQEINNDINKSSGYLGAISDRSKELFFNKETVGENLYRQLVKTPHTSLRNQVFYRQDYLDEFETIWETQAKFYPQLTHTLKEEIRDVIIFYQRKLKSQKSLISFCQFESWEQTYIEKETGKSKTRTVGRKVIPKSSPLFQEFKIWQNLNSLEFRNSDEGEIIEFIKLDEDIRQTVFEELNLRGNLKPNDVLKILGNYISLGKVSQWKCNFEEIEGNRTNAALYNVYQIIAENEGYGFDWAKKTASEINKELKNIFPQLGIDASILDFDFTQANFDKQTSYQLWHLLYSAEEDFKISEEDKVLYGNSSVSLKKKLHQKYGFKPEYTKLLTNISLQPDYGNLSAKAICNILPYLKENNVYSEACDLTGYNHSNFLTAEEQAKRPLKPILELLKKNSLRNPVVEKILNQMVNVVNQVIETYGKPDEIRIELTRELKKSAKERANMTKSIADATRRNDDYRKTIIKEFGIPNPTKSDVVRYRLWQELASRGYKDIFTDTEIKPQELFSNKIDIEHIIPKALLFDDSFSNKTLAFKKDNLKKANRTAYDFIANDYAPNLENYIERVESLHKDRKITRAKRNKLLMLQSKLPDGFIERDLRNSQYITKEAKKMLYEVCRTVVSTSGSITDKLREDWDLINVMKELNFPKYKALGLTEKIERYDIGAEKMKEVEIIEDWNKRNDHRHHAIDALTVAFSTHSHIQYLNHLNARRDEGHKKHAAIIAIESTITEKEGNKKRRFIAPLPNFRLQAKEHIESILVSFKNKNKVVTNNINKTKRIKKDKFNTKVQLTPRGQLHKETIYGKIKQPLEKHIKLNKSFTLEQAKLIIDKRQREKVLNHLEKYAHNSDIAFNSKTLKKNPLLISDEPLKEVLCFEEVFTIRKDISYDNFKNEKQLDKVIDEKVKQALKERINQYNGDFREAFSDIERNPIWLNKAKGICVKRATIKGVSNAEPLHTAKNHLGEEVLTENKEQIPVDYVSTGNNHHVAIYEDEDGNLQEKVVSFYEAVIRVNEGLPIIDKEYNKSLGWTFKFTMKQNEMFVFPSEDFNPTEIDLLDQKNASLISPNLFRVQKFTIKDYFFRHHLETTVENNNTLKNTTWRREGLSGIYGIIKIRLNHLGEIVQVGEY

SEQ ID NO: 262 - protein, 1060 aa, Kingella kingae
  Kingella kingae PYKK081
MAAKSLNYILGLDLGIASCGWAVVEMDEQENPLRLIDVGVRTFEEAENPKDGSSLAETRRLARAQRRLISRRANRMNKLCRLLKQENVLQANDYDEKGLIIGLPNQAWELRAQGLDRKLEPKEWAAVLIHLVKHRGYLSQRKNESQTADKELGALLSGMNHNHQLLQSQSNQYRTPAELAIKQFATQDGHIRNQRGAYTHTFNRLDLQNELNQLFDAQTRLGNPHVSGSLKTAINDLLMNQKAALSGDAILEMLGRCTFEPSEYKAAKNTYSAERFVWLGKLTNLRIQDNGLESALSREQRELLLNEPYNKTKLTYQQVRKLLRLPETAFFKGLRYGKDNAESATFMEMKSYHAIRKSLENKSLKSEWEKLKTQPKLLDLIGTAFSIYKTDDEIAGCLKNQLPENVIIALQGQLNFSNFMELSLKALEKLLPLMEQGLRYDEACTQIYGNRHEKIADKTEKFLPNIPADKLRNPVVLRTLTQARKVINAIIRRYGSPARVHIETGREVGKSFSDRDKLKKQQEENQEQRRRAIDEWKQFFPNAAHEPKAVDILKLRLYQLQQGKCLYSGLPIDVRRLPEKGYVEIDHALPFSRTWDDSFNNKILVLASENQNKGNQTPYEYLRGADNSESWRLFVENVQNCQFSPNKKQKIMAKQLDEKGFLERNLNDTRYVSRFLCQFISEHLHLTGKGKKRVFASNGQITALLRGRWGLSKNREENDRHHAVDAVVVACSTVAMQQKITQFVRYQKGNVFTGERIDKETGEVISIHFPTPWEHFREEVMIRVFDDNPLRTLPEKLPNRPEALHEYVMPLFVSRMPTRKMTGQGHKETIKSAKRLDEKISVLRVPLTQLKLNDLENMVNREREPALYEALKARLEQFKNDPAKAFAEPFFKQGGQQVKAVRVEIVQKSGMLLRKINGVADNGSMVRVDVFEKSGKFYLVPIYAWQVAEGILPNYAVVAHKDESDWILMDESYHFKFALYKNDLLEVQTKKGGIMGYFASLDRATGAITIREHDRDKKKCKDGEHRSIGVKMASSFKKLQVDELGKNIHETRSRKRPNIG

SEQ ID NO: 263 - protein, 1391 aa, Kordia algicida
  Kordia algicida OT-1
MKKILGLDLGTNSIGWALVNEAEHEHEQSSIVKLGVRVNPLSVDEKTNFEKGRPLSINADRTSKRSARRNLQRFKLRRKNLINLLLKHHIISNETILTEVGKNTTHQTLKLRSKATQEKISLEEFARILLSINKKRGYKSSRKEKNEDEGFTIDGMAIAKELYDNQLTPGQYVYNILQDGKNYIPDFYRSDLQAEFDDVWQFQKKFYSSILTDEFYLKLKGQGKENTRKLFLAIHQVYTAENKGKRDAVKLQYYKWRSEAVKKQLSIEEVAYVLVEINNNINKSSGYLGAISDRSKALYFNNETVGEYLYGQLVKNRHNSLRNQVFYRQDYLDEFEKIWETQAKFYDELTNELKQEIRDVVIFYQRKLKSQKHLISDCLFEKHHKAIPKSSPLFQEFKIWQNLNYLEFVHTQSKEKIFFSELDDETRQFVFAELNIRGTLKIKEIKKLIGLETPVYWKSNFDEIEGNRTNQVLYNVYQNIADDLGYGFDWSKKHAFEINAELQAIFKDVGIDTAILNFDASIEENDFDKQKSYQLWHLLYSAEDTDKATEEDKLIYGNINTKLKKQLHQKYGFEAKYGNLLANISLQQDYGNLSAKAIKKILPYLESGNSFYEACTIVGYNPSNSLTKEQQQNRKLKDKLELLPKNSLRNPVVEKILNQKVNLINQLIDEYGKPDEVRIELARELKKSAKQRADLSKHINDATLKNQNIRKTLQKDFGIQNPSKNDVIRYKLYDELKDNGYKTLFTNKYIPKEQLFSKDVDIEHIIPKAILFDDSFSNKTLAYRNVNLAKADATAFDFISSKHLDDLDNYKARVETLFQSKRISKGKYKKLLMTRQNLPEDFIERDLRNSQYIAKKATAMLKEVFRSVVPTSGRITDKLREDWDLVNVMKELNLPKYRTLGLTEFIERKNGNKIEQIIDWTKRNDHRHHAMDALTVAFTTHNHIQYLNNLNVTHGLNGVDTDHEKSRLYAIKQAITKVYIVGKTKKRKFIPPMENFRSHAKNHLEGILISFKNKNKVVTKNKNRTKTKTKGVFNEKIQLTPRGQLHKETIYGHAKKVIVTKEKVSSKFTHEKILQVTKPAYREALLKRLASFKNDPKKAFSGKNALSKNPLYFDITSGKKVPDTVKLSYFENSYVIRKEVNSDNFKNEKSLQKVLDVGIRRILEKRLADYNGNAKEAFSNLEKNPIWKDKEKGVCIKKVRIEALKNAEPLHVKKDHLGKIILDDENKSTPVDFISTGNNHHVAIYEDKDGKLHDKVVSFYEVVSRVNLGLPIIDKSFNSHLDWKFLFSMKQNEMFVFPSEDFNPKEIDIGNPKNNELISKYLFRVQKFSKVTYGNSAVRDYVFRHHLETELIDKKELKGITYYQLKSIGMLEKLVKVRINHIGKIVHIGEY

SEQ ID NO: 264 - protein, 1314 aa, Lactobacillus animalis
  Lactobacillus animalis KCTC 3501
MLKKDYSIGLDIGTNSVGHAVVTDDYKVPTKKMKVFGDTSKKTIKKNMLGVLLFNEGQTAADTRLKRGTRRRYTRRKNRLRYLQEIFAPELAKVDPNFLYRLEESSLVAEDKKYDVYPIFGKREEELLYHDTYKTIYHLRSALANNDQPADLRLVYLALAHIIKYRGNFLLEGEIDLRTTDINKVFAEFSETLNENSDENLGKLDVADIFKNNTFSKTKKSEELLKLSGAKKNQLAHQLFKMMVGNMGSFKKVLGTDEEHKLSFGKDTYEDDLNDLLAEAGDQYLDIFVAAKKVYDAAILASILDVKDTQTKTVFSQAMIERYEEHQKDLIELKRVFKKYLPEKCHDFFSEPKISGYAGYIDGKVSEEDFYKYTKKTLKGIPETEEILQKIDANNYLRKQRTFDNGAIPHQVHLKELVAIVENQGKYYPFLRENKDKFEKILNFRIPYYVGPLARGNSKFAWLTRAGEGKITPYNFDEMIDKETSAEDFIKHMTINDLYLPTEPVLPKHSLLYERYTIFNELAGVRYVTENGEAKYFDAQTKRSIFELFKLDRKVSEKMVIKHLKVVMPAIRIQALKGLDNGKFNASYGTYKDLVDMGVAPELLNDEVNSEKWEDIIKTLTIFEGRKLIKRRLENYRDFLGEDILRKLSRKKYTGWGRLSAKLLDGIYDKKTHKTILDCLMTEDYSQNFMQLINDDNYSFKETIKNAQVIEKEETLAKTVQELPGSPAIKKGILQSLEIVDEIIKVMGYKPKSIVVEMARETQKTHGTRKREDRVQQIVENLKDANELPEKLPSNAELSDERKYLYCLQNGRDMYTGAPLDYDHLQFYDVDHIIPQSFLKDDSIENKVLTIKKENVRKTNGLPSEAVIQKMGSFWKKLLDAGAMTNKKYDNLRRNLHGGLNEKLKERFIERQLVETRQITKYVAQLLDQRLNYDGNGVELDEKIAIVTLKAQLASQFRSEFKLRKVRALNNLHHAHDAYLNAIVANLIMAKYPELEPEFVYGKYRKAKFKGLGKATAKNTLYANVLYFLKENEVYPFWDKARDLPTIKRYLYRAQVNKVRKAERQIGGFSDEMLVPKSDSGKLLPRKEGLDPVKYGGYAKAVESYAVLITADEVKKGKTKKVKTLVNIPIIDSKKYEADPTAYLASRGYTNVTNSFILPKYSLLEDPEGRRRYLASFKEFQKANELILPQHLVELLYWVNAKDGEQKLEDHKAEFKELFDKIMEFADKYVVAPKNSEKIRRLYEENQDATPMELGKNFVELLRYTADGAASDFKFFGENIPRKRYNSAGSLLNGTLIYQSKTGLYETRIDLGKL

SEQ ID NO: 265 - protein, 1377 aa, Lactobacillus brevis
  Lactobacillus brevis subsp. gravesensis ATCC 27305
MESNHDGEQVKYTLGLDIGTSSIGYAAIDKHQKPIRAKGKHVIGVRLFQEGQTAADRRAFRTTRRRLKRRKWRLNLLNRLFDPYLSEVDPNFLPRLRQSNLSPKDDNKHFNGSTLFPDKTDAAFYRQYPTMYHLRYALMTEKRKFDIREVYLAIHHIVKYRGNFLNSATVDSFKTSNIDFTSQFDRLNELYRQVILDEPFQINMDQVDEMTNKLLDNDALKLDTQKQVAKLLPVIYNDKPIDKQYTRIATEFSKAILGYKTKLDVILNLDTQNAKDWVIRLDDEDIDDKLPALVENLDESRQEIVTIIRDLYAQITLNAIVPKGKSLSESMVDKYNDHKDHLDLLMGLIHELGDDSAKGIKLREAYTQYVGKSDDKTLNQDDFYAAIKKNLDEDSKRSPKIQRLIEQASFMPKQRTSANGVIPHQLHQLELDRIIENQGRYYPFLKKPNPNTHKPNGGKYKLDELVAFRIPYYVGPLITKRDQEKTSGADFAWMIRKPGQEGEITPWNFDQKVDRMASANRFIRRMTTKDSYLVAEDVLPDASLIYEKFKALNELNMLKVNDSRLSPSQKQDLFNNLFKKQKTIRTKKLQTYIRTNWELPSVMISGLADPDKFNSSLSTYIDFRDIFGEKVDDPNRQADYEEIIEWSTVFEDRKIYQAKLNQLDWLTEPQRKALLTKRYTGWGRLSKKLLTGLKDQNGDSILDQLWKTNDNFMQIQSRDEFAKQIHDENAKQFHEANNVDDILDDAFTSPQNKKAIRQVDKVVQDVVKAVGYAPDKIAIEFTRSLENNPQRTVSRQRQLQAAYKNIPREIMKSGLMAELGSVADSKKVLSDKLYLYFTQMGKDMYEDKTINIDNLPNYDIDHILPQAFIKDDSIDNRVLISKEENARKSNRVPLKFFGAKRMGFWKDLLNNGLISNRKFQNLTTDPEKISKYSAKGFIHRQLVETSQVIRLVANILGNEYSQAGTTIIEVSAKMNRQLREDFHLIKNRNVNDYHHAMDAYLTAYVGDYLYLRYPKLRPYFVYGDFKKAEDQDLNIRNFNFLHDLKDNESLDKIVDSETGEIVWEKHGSVKQLKKVYHYKFMLVSQEVYTRQDALFNQTIYPASDADKRKLIPIKNSKPVDVYGGYSGNIDAYMAIVRVHGKKEDNYKVVGIPMRAVTKLKKAEKEGHDSYLNAVHEVLKPQFTKKKKNRKTGEITETVDEFDVLLGKVYYRQLIVDGNKKFMLGSSSYQYNAKQLVLSDKAMQVLSKNGKVKSQDENQNLIDVYDEILEKVDQYFELYDQRHYRESLHKGRGIFVNLPLSNQYDGSKLTSYGKYETIDAILNGLHANATMSNLRYLGISSPFGKMQASNGLTIDPDSIICYQSPTGLFERQIKLSDL

SEQ ID NO: 266 - protein, 1371 aa, Lactobacillus buchneri
MKVNNYHIGLDIGTSSIGWVAIGKDGKPLRVKGKTAIGARLFQEGNPAADRRMFRTTRRRLSRRKWRLKLLEEIFDPYITPVDSTFFARLKQSNLSPKDSRKEFKGSMLFPDLTDMQYHKNYPTIYHLRHALMTQDKKFDIRMVYLAIHHIVKYRGNFLNSTPVDSFKASKVDFVDQFKKLNELYAAINPEESFKINLANSEDIGHQFLDPSIRKFDKKKQIPKIVPVMMNDKVTDRLNGKIASEIIHAILGYKAKLDVVLQCTPVDSKPWALKFDDEDIDAKLEKILPEMDENQQSIVAILQNLYSQVTLNQIVPNGMSLSESMIEKYNDHHDHLKLYKKLIDQLADPKKKAVLKKAYSQYVGDDGKVIEQAEFWSSVKKNLDDSELSKQIMDLIDAEKFMPKQRTSQNGVIPHQLHQRELDEIIEHQSKYYPWLVEINPNKHDLHLAKYKIEQLVAFRVPYYVGPMITPKDQAESAETVFSWMERKGTETGQITPWNFDEKVDRKASANRFIKRMTTKDTYLIGEDVLPDESLLYEKFKVLNELNMVRVNGKLLKVADKQAIFQDLFENYKHVSVKKLQNYIKAKTGLPSDPEISGLSDPEHFNNSLGTYNDFKKLFGSKVDEPDLQDDFEKIVEWSTVFEDKKILREKLNEITWLSDQQKDVLESSRYQGWGRLSKKLLTGIVNDQGERIIDKLWNTNKNFMQIQSDDDFAKRIHEANADQMQAVDVEDVLADAYTSPQNKKAIRQVVKVVDDIQKAMGGVAPKYISIEFTRSEDRNPRRTISRQRQLENTLKDTAKSLAKSINPELLSELDNAAKSKKGLTDRLYLYFTQLGKDIYTGEPINIDELNKYDIDHILPQAFIKDNSLDNRVLVLTAVNNGKSDNVPLRMFGAKMGHFWKQLAEAGLISKRKLKNLQTDPDTISKYAMHGFIRRQLVETSQVIKLVANILGDKYRNDDTKIIEITARMNHQMRDEFGFIKNREINDYHHAFDAYLTAFLGRYLYHRYIKLRPYFVYGDFKKFREDKVTMRNFNFLHDLTDDTQEKIADAETGEVIWDRENSIQQLKDVYHYKFMLISHEVYTLRGAMFNQTVYPASDAGKRKLIPVKADRPVNVYGGYSGSADAYMAIVRIHNKKGDKYRVVGVPMRALDRLDAAKNVSDADFDRALKDVLAPQLTKTKKSRKTGEITQVIEDFEIVLGKVMYRQLMIDGDKKFMLGSSTYQYNAKQLVLSDQSVKTLASKGRLDPLQESMDYNNVYTEILDKVNQYFSLYDMNKFRHKLNLGFSKFISFPNHNVLDGNTKVSSGKREILQEILNGLHANPTFGNLKDVGITTPFGQLQQPNGILLSDETKIRYQSPTGLFERTVSLKDL

SEQ ID NO: 267 - protein, 1371 aa, Lactobacillus buchneri
MKVNNYHIGLDIGTSSIGWVAIGEDGKPLRIKGKTAIGARLFQEGNPAADRRMFRTTRRRLSRRKWRLKLLEEIFDPYITPVDSTFFARLKQSNLSPKDSRKEFKGSMLFPDLTDMQYHKDYPTIYHLRHALMTQDEKFDIRMVYLAIHHIVKYRGNFLNSTPVDSFKASKVNFVDQFKKLNELYTAINPEESFQINLANSEDIGHQFLDPSIRKFDKKKQIPKIVPVSVDDKATDKINGKIASEIINAILGYKSKLDVVVQCTPVDSKSWALKFDEEDIDAKLQKILPEMDENQQSIIAILQNLYSQVTLNQIVPNGMSLSESMIEKYNDHHDHLKLYKKIIDQLADPKKKAALKKAYSQYVGDDGKVIEQADFWSSVKKNLDDSDLSKQIMDLIDAEKFMPKQRTSQNGVIPHQLHQRELDEIIEHQSKYYPWLAEINPNKHDLHLAKYKIEELVAFRVPYYVGPMITPDDQAKSAETVFSWMERKGKEAGQITPWNFDEKVDRNASANRFIKRMTTKDTYLIGEDVLPDESLLYEKFKVLNELNMVRVNGKLLKVADKQAIFQDLFENYKHISVKKLQNYIKSKTGLPSDPEISGLSDPEYFNNSLGTYNDFKKLFGNKVDEPDLQDDFEKIVEWSTVFEDKRILREKLNEITWLSDQQKDVLESSRYQGWGRLSKKLLTGIVNDQGERIIDELWNTNKNFMQIQSDNDFAKRIHEANADQMKAVDVEDVLADAYTSPQNKKAIRQVVKVVDDIQKAMGGVAPKYISIEFTRSEDRNPRRTISRQRQLENTLKDTAKSLAKSINPELLSELDNAAKSKKGLTDRLYLYFTQLGKDIYTGKPINIDEISTYDIDHILPQAFVKDDSLNNRVLVSKAINNGKSDNVPVQLFGAKMGHFWKQLAEAGLISKRKLKNLQTDPDTISKYAMHGFIRRQLVETSQVIKLVANILGDKYRNDNTKIIEITARMNHQMRDEFGFIKNREINDYHHAFDAYLTAFLGRYLYHRYIKLRPYFVYGDFKKFKEDKVTMRNFNFLHDLTDDTQEKIADAETGEVIWDRENSIQQLKDVYHYKFMLISHEVYTLRGAMFNQTVYPASDAGKRKLIPIKADRPINVYGGYSGSADAYMAIVRIHNKKGDKYRVVGVPMRARDRLDAAKKVSDADCDRALKDVLTPQLTKTKKSRKTGEITQVVEDFEIVLGKVMYRQLMIDGDKKFMLGSSTYQYNAKQLVLSDQSVKTLASKGRLDPLQESMDYNNVYTEILDKVNQYFSLYDMNKFRHKLNLGFSKFISFPNHNVFDGNTKASSGKREILEEVLNGLHANPTFGNLKDIGITTPFGQLQQPNGILLSDEAKIRYQSPTGLFERTVSLKDL

SEQ ID NO: 268 - protein, 1361 aa, Lactobacillus casei
  Lactobacillus casei BL23
MTKLGKPYGIGVDIGSNSIGFAAVDENSHLIRLKGKTVIGARLFEEGKAAADRRASRTTRRRLSRNRWRLSFLRDFFESHITPTGPNFFMRQKYSEISPKDKARYKYEKRLFNDRTDAEFYQQYPTMYHLRNRLLTDPSKADVREIYFAIHHILKSRGHFLTSGYAKDFNTNKVALNEIFPALQDAYAQVYPDLDITFDENKVNEFKTVLLNEKATPSDTQRALVNLLLAEDGDKDILKQQKQVLTEFAKAVVGLKTKLNVALGTEVDSSEATVWNFSLGQLDDKWAGIESAMTDEGTEILDQIRDLYRARLLNGIVPAGKTLSQAKVDDYAQHHEDLELFKDYLKQLEDDGTAKAIRQLYDRYIDGDDAKPFVREDFVKALTKEVTAHPNAKSPELLERLAQPDFMLKQRNKANGAIPVQMQQRELDQIIKNQSVYYDWLAAPNPVEKHRKSMPYQLDELLNFRIPYYVGPLVTAKEQKAAQGGVFAWMVRKDPDGNITPYNFDEKVDREASANTFIQRMKTTDTYLIGEDVLPKQSLLYQRYEVLNELNNVRVNNEKLSIEQKQQVIRELFERHNSVTIKQFAENLRAHGDYAHIPEIRGLADEKRFLSSLSTYRQLKSLLPDAIDDPAKQADIENIIAWSTVFEDAAIFKTKLKEINWLDSQTITKLSNIRYRGWGQFSHKFLNGLTLGNGHTIIQELFLSNNNLMQILTDETLQKKMTELNADKLKAANINDAIDDAYTSPSNKKALRQVLRVIEDIKRAADGQDPSWLYVETADGGGTPGKRTRARQHQLQEIYANAAHELIDSAVRGELEDKIADKADFNDRLVLYFMQGGRDIYTGTPLNIDQLSSYDIDHILPQSLIKDNSLDNRVLVHAIINREKNATFASTIYAQKMNATWRQWHEAGLISGRKLRNLQMRPDQIDKYASGFVARQLVETRQIIKLTEQIVAAQYPETKIIAVKAGLSHQLREELEFPKNRDVNHYHHAFDAFLAARIGTYLLKRFPNLQAFFTYGKFKKADVKKLRGFNFIRDITHAEDKIVVKDTGEVIWDKKRDVDELDRIYNFKRMLITHEVHFEKADLFKQTVYGAKDSKEAGGKKQLISKKKGYPVDIYGGYTQETGSYLSVVRLTKKAMYAVVKVSTRDAAKLAVAKSISEQKENETLNDIIDEKLSKISKNGKITHELFEVVLPRVGQKTLFKNSKYNLFLVNSDTYMHNYQELWMPREYQKMWKDISLSKYGDAQTEDQLDQIFGFIVSQVNSYFNLYDINQFRKKLNDAADKFATLPMRDTDDMQGKIATIGQLLIGLQANAARSDLRNLDIKTPLGLLQIPNGISLDSDTSVVYQSPTGLLEREVHLSDL

SEQ ID NO: 269 - protein, 1361 aa, Lactobacillus casei
  Lactobacillus casei Lc-10
MTKLGKPYGIGVDIGSNSIGFAAVDENSHLIRLKGKTVIGARLFEEGKAAADRRASRTTRRRLSRNRWRLSFLRDFFESHITPTGPNFFMRQKYSEISPKDKARYKYEKRLFNDRTDAEFYQQYPTMYHLRNRLLTDPSKADVREIYFAIHHILKSRGHFLTSGYAKDFNTNKVALNEIFPALQDAYAQVYPDLDITFDENKVNEFKTVLLNEKATPSDTQRALVNLLLAEDGDKDILKQQKQVLTEFAKAVVGLKTKLNVALGTEVDSSEATVWNFSLGQLDDKWAGIESAMTDEGTEILDQIRDLYRARLLNGIVPAGNTLSQAKVDDYAQHHEDLELFKDYLKQLEDDGTAKAIRQLYDRYIDGDDAKPFVREDFVKALTKEVTAHPNAKSPELLERLAQPDFMLKQRNKANGAIPVQMQQRELDQIIKNQSVYYDWLAAPNPVEKHRKSMPYQLDELLNFRIPYYVGPLVTAKEQKAAQGGVFAWMVRKDPDGNITPYNFDEKVDREASANTFIQRMKTTDTYLIGEDVLPKQSLLYQRYEVLNELNNVRVNNEKLSIEQKQQVIRELFERHNSVTIKQFAENLRAHGDYAHIPEIRGLADEKRFLSSLSTYRQLKSLLPDAIDDPAKQADIENIIAWSTVFEDAAIFKTKLKEINWLDSQTITKLSNIRYRGWGQFSHKFLNGLTLGNGHTIIQELFLSNNNLMQILTDETLQKKMTELNADKLKAANINDAIDDAYTSPSNKKALRQVLRVIEDIKRAADGQDPSWLYVETADGGGTPGKRTRARQHQLQEIYANAAHELIDSAVRGELEDKIADKADFNDRLVLYFMQGGRDIYTGTPLNIDQLSSYDIDHILPQSLIKDNSLDNRVLVHAIINREKNATFASTIYAQKMNATWRQWHEAGLISGRKLRNLQMRPDQIDKYASGFVARQLVETRQIIKLTEQIVAAQYPETKIIAVKAGLSHQLREELEFPKNRDVNHYHHAFDAFLAARIGTYLLKRFPNLQAFFTYGKFKKADVKKLRGFNFIRDITHAEDKIVVKDTGEVIWDKKRDVDELDRIYNFKRMLITHEVHFEKADLFKQTVYGAKDSKEAGGKKQLISKKKGYPVDIYGGYTQETGSYLSVVRLTKKAMYAVVKVSTRDAAKLAVAKSISEQKENETLNDIIDEKLSKISKNGKITHELFEVVLPRVGQKTLFKNSKYNLFLVNSDTYMHNYQELWMPREYQKMWKDISLSKYGDAQTEDQLDQIFGFIVSQVNSYFNLYDINQFRKKLNDAADKFATLPMRDTDDMQGKIATIGQLLIGLQANAARSDLRNLDIKTPLGLLQIPNGISLDSDTSVVYQSPTGLLEREVHLSDL

SEQ ID NO: 270 - protein, 1363 aa, Lactobacillus casei
  Lactobacillus casei M36
MTKLGKPYGIGVDIGSNSIGFAAVDENSHLIRLKGKTVIGARLFEEGKAAADRRASRTTRRRLSRNRWRLSFLRDFFESHITPTDPNFFMRQKYSEISPKDKARYKYEKRLFNDRTDAEFYQQYPTMYHLRNRLLTDPSKADVREIYFAIHHILKSRGHFLTSGYAKDFNTNKVALNEIFPALQDAYAQVYPDLDITFDENKVNEFKTVLLDEKATPSDTQRALVNLLLAEDGDKDILKQQKQVLTEFAKAVVGLKMKLNVALGTEVDSSEATAWNFSLGQLDDKWAGIESAMTDEGTEILDQIRDLYRARLLNGIVPAGKTLSQAKVDDYEQHHEDLELFKDYLKQLEDDGMAKVIRQLYDRYIDGDDAKPFVREDFVKALTKEVTAHPNAKSPELLERLVQPDFMLKQRNKANGAIPVQMQQRELDQIIKNQSVYYDWLAAPNPVEKHRQSMPYQLDELLNFRIPYYVGPLVTAKEQKAAQGGVFAWMVRKDPDGNITPYNFDEKVDREASANTFIQRMKTTDTYLIGEDVLPKQSLLYQSYEVLNELNNVRVNDNKLSFDQKQQVLGELFERHNTVTIKQFVDNLLAHGDYDRIPEVRGLADEKRFLSSLSTYNQLKGILHEAIDDSDKQTDIEKIIAWSTIFEDKAIFKTKLNEISWLTAGMINSLANIRYRGWGQFSHKLLNELTLSTGRTVFEELLISSHNLMQILTDEVLKQKIAELNAHELKASGIYAAIDDAYTSPSNKKALRQVLSVIDDITNAAGQAPNWLYIETADGDGVPGKRTNSRQRKIQEIYANAAQELITGSVRGELEDKIASRADFTDRLVLYFMQGGRDIYTGEPLNIDNLSSYDIDHILPQSLIKDNSLDNRVLVHPLVNREKDTIFASTRFAKQMNGMWRQWHAAGLISSRKLRNLQMRPDEIDKYASGFVARQLVETRQIIKLTEQIVADQYPDAKIIAVKAGLSSQLRKELDFPKNREVNHYHHAFDAFLAARIGTYLLKRYPNLEPFFTYGKFKKTEVKKLKSLKSFNFIRDMTHAKDKIVAKETGEIVWDNASDINELDRIYNFKRMLITHEVRFETASLFKQTLYAAKNSKNRGGSRQLIPKKKGYLVDIYGGYTQETGSYLSVVRLTKKAMYAVVKVSTRDAAKLAVAKSISEQKENETLKKIIDGKLSKTSKKGKTTHQLFEIVLPRVGQKTLFKNSKYNQFLVNSDTYMHNYQELWMPREYQRMWKDILLSNHGDAQLEGQLDQIFKFIVSQVNSYFNLYDINQFRKKIADATDKFAKLPTHDTDNARGKIATIGQLLIGLQANAMRSDLRNLDIKTPFGLLQIGTGITLDLDTSIIYQSPTGLFEREVPLTDL

SEQ ID NO: 271 - protein, 1361 aa, Lactobacillus casei; identical to SEQ ID NO: 268
  Lactobacillus casei group

SEQ ID NO: 272 - protein, 1360 aa, Lactobacillus casei
  Lactobacillus casei T71499
MTKLGKPYGIGVDIGSNSIGFAAVDENSHLIRLKGKTVIGARLFEEGKAAADRRASRTTRRRLSRNRWRLSFLRDFFESHITPTDPNFFMRQKYSEISPKDKARYKYEKRLFNDRTDAEFYQQYPTMYHLRTRLLTDPSKADVREIYFAIHHILKSRGHFLTPGYAKDFNTNKVALNEIFPALQDAYAQVYPDLDITFDENKVNEFKTVLLNEKATPSDTQRALVNLLLAEDGDKDILKQQKQVLTEFAKAVVGLKTKLNVALGTEVDSSEATVWNFSLGQLDDKWAGIESAMTDEGTEILDQIRDLYRARLLNGIVPAGKTLSQAKVDDYAQHHEDLELFKDYLKQLEDDGTAKAIRQLYDRYIDGDDAKPFVREDFVKALTKEVTAHPNAKSPELLERLAQPDFMLKQRNKANGAIPVQMQQRELDQIIKNQSVYYDWLAAPNPVEKHRKSMPYQLDELLNFRIPYYVGPLVTAKEQKAAQGGVFAWMVRKDPDGNITPYNFDEKVDREASANTFIQRMKTTDTYLIGEDVLPKQSLLYQSYEVLNELNNVRVNDNKLSFDQKQQVLGELFERHNTVTIKQFVDNLLAHGDYDRIPEVRGLADEKRFLSSLSTYNQLKGILHEAIDDADKQTDIENIIAWSTIFEDKAIFKTKLNEISWLNAGMINSLANIRYRGWGQFSHKLLNELTLSTGRTVFEELLISSRNLMQILTDEVLKQKIAELNAHELKASGIYAAIDDAYTSPSNKKALRQVLSVIDDITNAAGQAPNWLYIETADGDGVPGKRTNSRQRKIQEIYANAAQELITGSVRGELEDKIASRADFTDRLVLYFMQGGRDIYTGEPLNIDNLSSYDIDHILPQSLIKDNSLDNRVLVHPLVNREKDTIFASTRFAKQMNGMWRQWHAAGLISSRKLRNLQMRPDEIDKYASGFVARQLVETRQIIKLTEQIVADQYPDTKIIAVKAGLSSQLRKELDFPKNREVNHYHHAFDAFLAARIGTYLLKRYPNLEPFFTYGKFKKTEVKKLKSFNFIRDMTHAKDKIVAKETGEIVWDNASDINELDRIYNFKRMLITHEVRFETASLFKQTLYAAKNSKNRGGSRQLIPKKKGYLVDIYGGYTQETGSYLSVVRLTKKAMYAVVKVSTRDAAKLAVAKSISEQKENETLKKIIDGKLSKTSKKGKTTHQLFEIVLPRVGQKTLFKNSKYNQFLVNSDTYMHNYQELWMPREYQRMWKDILLSNHGDAQLEGQLDQIFKFIVSQVNSYFNLYDINQFRKKIADATDKFAKLPTHDTDNARGKIATIGQLLIGLQANAMRSDLRNLDIKTPFGLLQIGTGITLDLDTSIIYQSPTGLFEREVPLTDL

SEQ ID NO: 273 - protein, 1366 aa, Lactobacillus casei
  Lactobacillus casei UCD174
MTKLGKPYGIGVDIGSNSIGFAAVDENSHLIRLKGKTVIGARLFEEGKAAAYRRASRTTRRRLSRNRWRLSFLRDFFESHITPTDPNFFMRQKYSEISPKDKARYKYEKRLFNDRTDAEFYQQYPTMYHLRTRLLTDPSKADVREIYFAIHHILKSRGHFLTPGYAKDFNTNKVALNEIFPALQDAYAQVYPDLDITFDENKVNEFKTVLLNEKATPSDTQRALVNLLLAKEGDRDILKQQKQVLTEFAKAVVGLKTKLNVALGTEVDSSEATAWNFSLGQLDDKWAGIESAMTDEGTEILDQIRDLYRARLLNGIVPAGKTLSQAKVDDYAQHHEDLELFKDYLKQLEDDGTAKAIRQLYDRYIDGDDAKPFVREDFVKALTKEVTAHPNAKSPELLERLAQPDFMLKQRNKANGAIPVQMQQRELDQIIKNQAVYYDWLAAPNPVEKHRQSMTYQLDELLNFRIPYYVGPLVTAKEQKAAQGGVFAWMVRKDPDGNITPYNFDEKVDREASANTFIQRMKTTDTYLIGEDVLPKQSLLYQSYEVLNELNNVRVNDNKLSFDQKQQVLGELFERHNTVTIKQFVDNLLAHGDYDRIPEVRGLADEKRFLSSLSTYNQLKGILHEAIDDADKQTDIENIIAWSTIFEDKAIFKTKLNEISWLNAGMINSLANIRYRGWGQFSHKLLNELTLSTGRTVFEELLISSRNLMQILTDEVLKQKIAELNAHELKASGIYAAIDDAYTSPSNKKALRQVLSVIDDITNAAGQAPNWLYIETADGDGVPGKRTNSRQRKIQEIYANAAQELITGSVRGEFEDKIASRADFTDRLVLYFMQGGRDIYTGEPLNIDNLSSYDIDHILPQSLIKDNSLDNRVLVHPLVNREKDTIFASTRFAKQMNGMWRQWHAAGLISSRKLRNLQMRPDEIDKYASGFVARQLVETRQIIKLTEQIVADQYPDTKIIAVKAGLSSQLRKELDFPKNREVNHYHHAFDAFLAARIGTYLLKRYPNLEPFFTYGKFKKTEVKKLKSLKSLKSFNFIRDMTHAKDKIVAKETGEIVWDNASDINELDRIYNFKRMLITHEVRFETASLFKQTLYAAKNSKNRGGSRQLIPKKKGYLVDIYGGYTQETGSYLSVVRLTKKAMYAVVKVSTRDAAKLAVAKSISEQKENETLKKIIDGKLSKTSKKGKTTHQLFEIVLPRVGQKTLFKNSKYNQFLVNSDTYMHNYQELWMPREYQRMWKDILLSNHGDAQIEGQLDQIFKFIVSQVNSYFNLYDINQFRKKIADATDKFAKLPTHDTDNARGKIATIGQLLIGLQANAMRSDLRNLDIKTPFGLLQIGTGITLDLDTSIIYQSPTGLFEREVPLTDL

SEQ ID NO: 274 - protein, 1389 aa, Lactobacillus casei
MIIRTYELKTITTIAILKMFQLLTGGLSMTKLGKPYGIGVDIGSNSIGFAAVDENSHLIRLKGKTVIGARLFEEGKAAADRRASRTTRRRLSRNRWRLSFLRDFFESHITPTGPNFFMRQKYSEISPKDKARYKYEKRLFNDRTDAEFYQQYPTMYHLRNRLLTDPSKADVREIYFAIHHILKSRGHFLTSGYAKDFNTNKVALNEIFPALQDAYAQVYPDLDITFDENKVNEFKTVLLNEKATPSDTQRALVNLLLAEDGDKDILKQQKQVLTEFAKAVVGLKTKLNVALGTEVDSSEATVWNFSLGQLDDKWAGIESAMTDEGTEILDQIRDLYRARLLNGIVPAGKTLSQAKVDDYAQHHEDLELFKDYLKQLEDDGTAKAIRQLYDRYIDGDDAKPFVREDFVKALTKEVTAHPNAKSPELLERLAQPDFMLKQRNKANGAIPVQMQQRELDQIIKNQSVYYDWLAAPNPVEKHRKSMPYQLDELLNFRIPYYVGPLVTAKEQKAAQGGVFAWMVRKDPDGNITPYNFDEKVDREASANTFIQRMKTTDTYLIGEDVLPKQSLLYQRYEVLNELNNVRVNNEKLSIEQKQQVIRELFERHNSVTIKQFAENLRAHGDYAHIPEIRGLADEKRFLSSLSTYRQLKSLLPDAIDDPAKQADIENIIAWSTVFEDAAIFKTKLKEINWLDSQTITKLSNIRYRGWGQFSHKFLNGLTLGNGHTIIQELFLSNNNLMQILTDETLQKKMTELNADKLKAANINDAIDDAYTSPSNKKALRQVLRVIEDIKRAADGQDPSWLYVETADGGGTPGKRTRARQHQLQEIYANAAHELIDSAVRGELEDKIADKADFNDRLVLYFMQGGRDIYTGTPLNIDQLSSYDIDHILPQSLIKDNSLDNRVLVHAIINREKNATFASTIYAQKMNATWRQWHEAGLISGRKLRNLQMRPDQIDKYASGFVARQLVETRQIIKLTEQIVAAQYPETKIIAVKAGLSHQLREELEFPKNRDVNHYHHAFDAFLAARIGTYLLKRFPNLQAFFTYGKFKKADVKKLRGFNFIRDITHAEDKIVVKDTGEVIWDKKRDVDELDRIYNFKRMLITHEVHFEKADLFKQTVYGAKDSKEAGGKKQLISKKKGYPVDIYGGYTQETGSYLSVVRLTKKAMYAVVKVSTRDAAKLAVAKSISEQKENETLNDIIDEKLSKISKNGKITHELFEVVLPRVGQKTLFKNSKYNLFLVNSDTYMHNYQELWMPREYQKMWKDISLSKYGDAQTEDQLDQIFGFIVSQVNSYFNLYDINQFRKKLNDAADKFATLPMRDTDDMQGKIATIGQLLIGLQANAARSDLRNLDIKTPLGLLQIPNGISLDSDTSVVYQSPTGLLEREVHLSDL

SEQ ID NO: 275 - protein, 1354 aa, Lactobacillus coryniformis
  Lactobacillus coryniformis subsp. coryniformis KCTC 3167
MTLHYNVGLDIGTNSVGYTIVDDNGKILQVKGKNGYGVRVFKEGATAAERRIFRTTHRRLKRRKWRLRLLQDFFEPYILPQDDGFFIRRKESNLVLNDRDEDTASLFNDRSDRDFYQAYPTIYHLRQALMTEKRQFDVREIYLAMHHIIKYRGHFLLNGTVNNFTNNKIDLHSDFEELNALLLNVIPELKFQIDLDHSTMFQTTLLNTTISRSGRQRDLVKSFYNGSDDKQLAKQQKSVATELLKAILGLKAKFHKLFNLDLLETTEWEFSFDAEDIDDKLAKLEPLMTENQQQVMDILQRIFAAITLNGIVPEGKTLSASKVDSYQKHKQDLKLLKAIAQHSDKKTATVLQTAYNEYINGIASKPLKQEDFYKRLTNAVKKSSDPQVADMLALIDQEKFLPKQRTKENGAIPHQLHQLELERIIDNQKDYYPWLAELNPNQARQKVAKYKLSELVAFRVPYYVGPLIEPEVQQATSNAHFAWMARKEAGPITPWNFDQKVDRNVSAERFIKRMTTKDTYLLAEDVLPLHSLLYQRFIVLNELNNVRVNGQKLTKKQKQAVYQDLFKRQPHVTKKQFKSYLVQTGEFAESSKIEGLANETSFNSGLTTENELRKIFGAQLDEARYQVDFEQIIEWATLFEDAKILRTKLAEITWLTTEQIEKLAGIRYRGWGRFSRKLLAGLRDQNGQQIIDLLWDTPNNFMVIVSQAAFSEAITKENEKLIDRRGAQDVITDLYTSPQNKKALRQVLAIVADVQKAMGGVPPQRIFIEFAREDEKNPRRSVERSRQLEKLYQTISNEFLINSEVRQELKEAVDQKVNFKDRLFLYFLQGGVDLYSGKRINIDQLSHYDIDHILPQSFIKDDSLDNRVLVSQKLNRSKSDSVPLSEFANYKFGPAMQAKWLQLKEAGLLSKRKYDNLTLDPTKLSKFAPLGFVNRQLVETRQVIKLAANLLASEETKVVTIKANMTHQVRKELDFPKNRNVNNYHHAFDAYLTAFVGIFLSKRYPKLKPYFTYGDFQKGNKLPDLKNFNFLYELKNKDRSIDSNTGEIIWDKQRDLAYMNKIYNFKKVTVVHEVLTKSGALYNQTLYKASEDKASGRGTKQLIRKKDNMPTELYGGYTGSTSAFMSIVRLWKKDKPYYKVVGIPTRMAAKLANQAQLLDYLTKKFTTRKLVKKTGDYKTTVERFELVVPKVGFNQLVIDGGQPFMLGSATYQYNARELFISKEAVKALNKQLSTHVDLVQVFDEILVQVNRWFPLYDTNGFREKLSHGRDRFMKLNDSFEEKSDTQIDVLNRILIGFHANAARTNLKILGLGTDLGFMTQQAGIRLTEKAILVHQSPSGLFERKVALRDLKGLR

SEQ ID NO: 276 - protein, 1119 aa, Lactobacillus coryniformis
  Lactobacillus coryniformis subsp. torquens KCTC 3535
MGYRIGLDVGITSTGYAVLKTDKNGLPYKILTLDSVIYPRAENPQTGASLAEPRRIKRGLRRRTRRTKFRKQRTQQLFIHSGLLSKPEIEQILATPQAKYSVYELRVAGLDRRLTNSELFRVLYFFIGHRGFKSNRKAELNPENEADKKQMGQLLNSIEEIRKAIAEKGYRTVGELYLKDPKYNDHKRNKGYIDGYLSTPNRQMLVDEIKQILDKQRELGNEKLTDEFYATYLLGDENRAGIFQAQRDFDEGPGAGPYAGDQIKKMVGKDIFEPTEDRAAKATYTFQYFNLLQKMTSLNYQNTTGDTWHTLNGLDRQAIIDAVFAKAEKPTKTYKPTDFGELRKLLKLPDDARFNLVNYGSLQTQKEIETVEKKTRFVDFKAYHDLVKVLPEEMWQSRQLLDHIGTALTLYSSDKRRRRYFAEELNLPAELIEKLLPLNFSKFGHLSIKSMQNIIPYLEMGQVYSEATTNTGYDFRKKQISKDTIREEITNPVVRRAVTKTIKIVEQIIRRYGKPDGINIELARELGRNFKERGDIQKRQDKNRQTNDKIAAELTELGIPVNGQNIIRYKLHKEQNGVDPYTGDQIPFERAFSEGYEVDHIIPYSISWDDSYTNKVLTSAKCNREKGNRIPMVYLANNEQRLNALTNIADNIIRNSRKRQKLLKQKLSDEELKDWKQRNINDTRFITRVLYNYFRQAIEFNPELEKKQRVLPLNGEVTSKIRSRWGFLKVREDGDLHHAIDATVIAAITPKFIQQVTKYSQHQEVKNNQALWHDAEIKDAEYAAEAQRMDADLFNKIFNGFPLPWPEFLDELLARISDNPVEMMKSRSWNTYTPIEIAKLKPVFVVRLANHKISGPAHLDTIRSAKLFDEKGIVLSRVSITKLKINKKGQVATGDGIYDPENSNNGDKVVYSAIRQALEAHNGSGELAFPDGYLEYVDHGTKKLVRKVRVAKKVSLPVRLKNKAAADNGSMVRIDVFNTGKKFVFVPIYIKDTVEQVLPNKAIARGKSLWYQITESDQFCFSLYPGDMVHIESKTGIKPKYSNKENNTSVVPIKNFYGYFDGADIATASILVRAHDSSYTARSIGIAGLLKFEKYQVDYFGRYHKVHEKKRQLFVKRDE

SEQ ID NO: 277 - protein, 1368 aa, Lactobacillus curvatus
  Lactobacillus curvatus CRL 705
MSRPYNIGLDIGTSSIGWSVVDDQSKLVSVRGKYGYGVRLYDEGQTAAERRSFRTTRRRLKRRKWRLGLLREIFEPYITPIDDTFFLRQKQSNLSPKDQRKLYTQTSLFNDRTDRAFYDDYPTIYHLRYRLMTEKRQFDIREIYLAMHHIVKYRGHFLNEAPVSSFKSSEINLVAHFDRLNTIFADLFSESGFQLETDKLAEVKALLLDNQQSASNRQRQALSLIYTPSTNKAVEKQNKAIATELLKAILGLKAKFNVLTGIEAEDVKAWTLTFNAENFDEEMVKLESSLDDNAHQIIESLQELYSGVLLAGIVPENQSLSQAMITKYDDHQKHLKMLKAVREALAPGDRQRLKQAYDQYVDGQENTKAYSKEDFYGDITKALKNNPDHPIVSEIKKLIELDQFMPKQRTKDNGAIPHQLHQQELDRIIENQQQYYPWLAELNPNSKRQTVAKYKLDELVAFRVPYYVGPLITAEQQRQSSDAKFAWLIRKAEGRITPWNFDDKVDRQASANEFIKRMTTTDTYLLAEDVLPKQSLIYQRFEVLNELNGLKIDDQPITTELKQAIFTDLFMQKISVTVKNIQDYLVSEKRYASRPAITGLSDENKFNSRLSTYHDLKMIVGDAVDDVDKQADLEKCIEWSTIFEDGKIYSAKLNEIDWLTDQQRVQLAAKRYRGWGRLSAKLLTQIVNANGQRIMDLLWDTTDNFMRIVHSEDFDKLITEANQMMLAENDVQDVINDLYTSPQNKKALRQILLVVNDIQKAMKGQAPERILIEFAREDEVNSRLSVQRKRQVEQVYQNISNELLNNTEIRNELKDLSNSALSNTRLFLYFMQGGRDMYTGDSLNIDRLSTYDIDHILPQSFIKDNSLDNRVLVSQKMNRSKADQVPTDFTSVELGQKMQIQWEQMLRAGLITKKKYDNLTLNPDHISKYAMKGFINRQLVETRQVIKLATNLLMEQYGEDNIELITVKSGLTHQMRTEFDFPKNRNLNNHHHAFDAYLTAFVGLYLLKRYPKLKPYFVYGEYQKASQQDKWRNFNFLNGLKKDELVDENTEAVIWDKESGLAYLNKIYQFKKILVTRGVHENSGALFNQTLYAAKDDKASGQGGKQLIPAKQDRSTALYGGYSGKTVAYMCIVRIKNKKGDLYKVCGVETSWLAQLKQLTDEDSQKAFLEQKISPQFTKVKKQKGNIIEAVEEFEVIAPHILINQRFFDNGQELTLGSATYKHNEQELILDKTAVKLLNGALPLTQSEELAEQVYDEILDQVMHYFPLYDTNQFRAKLSTGKAAFMKLPWKSQWDGNKMVQVGQQVILDRILIGLHANAAMSDLKVLKMTTPFGMIQQSTGITLSADTQIIYQSPTGLFERRVALRDL

SEQ ID NO: 278 - protein, 1126 aa, Lactobacillus farciminis
  Lactobacillus farciminis KCTC 3681
MADRISLGLDIGVASVGFSVLDIDKGKVIELGARLFSATVAAGNQDRRDMRGARRLLNRNKQRRQDTGKLFKKFGLIDDFDKGSFYDNFNQNLNPYELRVKGLTEQLTKEELAESLYQIVKHRGISYALKDADVDEGGTDYSVSLKINSQELAEKTPAQIQLQRLNDYGKVRGQVVIGDDPDNQKVLLNVFPTSAYEKEAKQIIATQQQFYPESLTDKFTEEYCQILTRKRDYFVGPGNEKSRTDYGIYKTDGRTLDNLFEELIGHDKIYPEELRASAASYTAQLFNVLNDLNNLRILNYEDGKLTKEDKEKIIAEIKNNTTTINMLNVIKKVAGCSKDDIKGFRVNEKDKPEISSMPVYRKIHKDLLKAGVDISDWPVEFIDELSFILTLNTENGEIRKQLNNRLAPKFDFLNADLIQLIIDNKDSFEIKTNNKWHRFSVKTMNKLIPEMMERPVEQMTLLNEMGLVKKDKKRFENNKYLPYKEIAKDIFNPVASKSVREALKIVNAVLKKYGHIDYLVVEMPRDKNLKEEQDNIKEFQNKNKKAKDAAFEAFVKSVGSEQRVKEALSKNRKLQMKMRLWYQQQEIDPYNGKTIDATDLINNPDKFEIDHIIPQSISFYDSINNKTLCFASMNQVKGQKTPYEFMLEGHGQSYDKFKATVMANKNFGKAKRANYLFEENVSDIETRKRFLSRNLVDTRYSSRVVLNSLQDFFREKSADTKVTVIRGKFTSNMRKHWHIDKTRETFHHHAIDASIIAATPFLRMWKKGGTIFPVKVGEESIDIETGEILDDKNFDKAMYEEPYSGFVSEIMNADDRIKFSHQVDKKMNRKVSDATIYSTRTGKLAKDKKDAEYIVAKVKDIYSVDGFKKFKKVYDKDKTKFLLYKYDPRTFSKLERIISDCPDKVEKVQTNGKVKAVDISPFEMYRRDHGMIKKYSKKGNGPAIKQLKYLDKKLGSHIDITPANANGKHVILQSLKPWRTDVYLNHETGEYEIMGIKYSDLKFNKNEGYGIKKDKYLEIKKVEEVSEKSEFMFSLYRKDRVKVQDMKTGESVELLFWSRNFSNKKYAELKPISQAENDKKLPVYGKGRLIKRLIPKNCKIWKVNTTILGDPYYLEKESDSPKDILD

SEQ ID NO: 279 - protein, 1356 aa, Lactobacillus farciminis
  Lactobacillus farciminis KCTC 3681
MTKKEQPYNIGLDIGTSSVGWAVTNDNYDLLNIKKKNLWGVRLFEEAQTAKETRLNRSTRRRYRRRKNRINWLNEIFSEELAKTDPSFLIRLQNSWVSKKDPDRKRDKYNLFIDGPYTDKEYYREFPTIFHLRKELILNKDKADIRLIYLALHNILKYRGNFTYEHQKFNISNLNNNLSKELIELNQQLIKYDISFPDDCDWNHISDILIGRGNATQKSSNILKDFTLDKETKKLLKEVINLILGNVAHLNTIFKTSLTKDEEKLNFSGKDIESKLDDLDSILDDDQFTVLDAANRIYSTITLNEILNGESYFSMAKVNQYENHAIDLCKLRDMWHTTKNEEAVEQSRQAYDDYINKPKYGTKELYTSLKKFLKVALPTNLAKEAEEKISKGTYLVKPRNSENGVVPYQLNKIEMEKIIDNQSQYYPFLKENKEKLLSILSFRIPYYVGPLQSAEKNPFAWMERKSNGHARPWNFDEIVDREKSSNKFIRRMTVTDSYLVGEPVLPKNSLIYQRYEVLNELNNIRITENLKTNPIGSRLTVETKQRIYNELFKKYKKVTVKKLTKWLIAQGYYKNPILIGLSQKDEFNSTLTTYLDMKKIFGSSFMEDNKNYDQIEELIEWLTIFEDKQILNEKLHSSKYSYTPDQIKKISNMRYKGWGRLSKKILMDITTETNTPQLLQLSNYSILDLMWATNNNFISIMSNDKYDFKNYIENHNLNKNEDQNISDLVNDIHVSPALKRGITQSIKIVQEIVKFMGHAPKHIFIEVTRETKKSEITTSREKRIKRLQSKLLNKANDFKPQLREYLVPNKKIQEELKKHKNDLSSERIMLYFLQNGKSLYSEESLNINKLSDYQVDHILPRTYIPDDSLENKALVLAKENQRKADDLLLNSNVIDRNLERWTYMLNNNMIGLKKFKNLTRRVITDKDKLGFIHRQLVQTSQMVKGVANILDNMYKNQGTTCIQARANLSTAFRKALSGQDDTYHFKHPELVKNRNVNDFHHAQDAYLASFLGTYRLRRFPTNEMLLMNGEYNKFYGQVKELYSKKKKLPDSRKNGFIISPLVNGTTQYDRNTGEIIWNVGFRDKILKIFNYHQCNVTRKTEIKTGQFYDQTIYSPKNPKYKKLIAQKKDMDPNIYGGFSGDNKSSITIVKIDNNKIKPVAIPIRLINDLKDKKTLQNWLEENVKHKKSIQIIKNNVPIGQIIYSKKVGLLSLNSDREVANRQQLILPPEHSALLRLLQIPDEDLDQILAFYDKNILVEILQELITKMKKFYPFYKGEREFLIANIENFNQATTSEKVNSLEELITLLHANSTSAHLIFNNIEKKAFGRKTHGLTLNNTDFIYQSVTGLYETRIHIE

SEQ ID NO: 280 - protein, 1313 aa, Lactobacillus fermentum
  Lactobacillus fermentum 28-3-CHN
MHYLDEIFAPHLQEVDENFLRRLKQSNIHPEDPAKNQAFIGKLLFPDLLKKNERGYPTLIKMRDELPVEQRAHYPVTNIYKLREAMINEDRQFDLREVYLAVHHIMKYRGHFLNNASVDKFKVGRIDFYKSFNVLNEAYEELQNGEGSFTIEPSKVEKIGQLLLDTKMRKLNRQKAVAKLLEVKVADKEETKRNKQIATAMSKLVLGYKADFATVAMANGNEWKIDLSSETSEDEIEKFREELSDAQNDILTEITSLFSQIMLNEIVPNGMSISESMMDRYWTHERQLAEVKEYLATQPASARKEFDQVYNKYIGQAPKERGFDLEKGLKKILSKKENWKEIDELLKAGDFLPKQRTSANGVIPHQMHQQELDRIIEKQAKYYPWLATENPATGERDRHQAKYELDQLVSFRIPYYVGPLVTPEVQKATSGAKFAWAKRKEDGEITPWNLWDKIDRAESAEAFIKRMTVKDTYLLNEDVLPANSLLYQKYNVLNELNNVRVNGRRLSVGIKQDIYTELFKKKKTVKVSDVASLVMAKTRGVNKPSVEGLSDPKKFNSNLATYLDLKSIVGDKVDDNRYQTDLENIIEWRSVFEDGEIFADKLTEVEWLTDQQRSALVKKRYKGWGRLSKKLLTGIVDENGQRIIDLMWNTDQNFMQIVNQPVFKEQIDQLNQKAITNDGMTLREWVESVLDGAYTSPQNKKAIWQVVRVVEDIVKAVGNAPKSISIEFARNEGNKGEITRSRRTQLQKLFEDQAHELVKDTSLTEELEKAPDLSDRYYLYFTQGGKDMYTGDPINFDEISTKYDIDHILPQSFVKDDSLDNRVLVSRAENNKKSDRVPAKLYAAKMKPYWNQLLKQGLITQRKFENLTMDVDQNIKYRSLGFVKRQLVETRQVIKLTANILGSMYQEAGTDIIETRAGLTKQLREEFDLPKVREVNDYHHAVDAYLTTFAGQYLNRRYPKLRSFFVYGEYMKFKHGSDLKLRNFNFFHELMEGDKSQGKVVDQQTGELITTRDEVAKSFDRLLNMKYMLVSKEVHDRSDQLYGATIVTAKESGKLTSPIEIKKKRPVDLYGAYTNGTSAFMTIIKFTGNKPKYKVIGVPTTSAVGLKRVGKPGSESYNQELHRIIKSNPKVKKDFEIVVPHVSYSQLIVDDDCKFTLASDTYQHPATQLVLSKESMEIIADDFKFVKENTATADEQLVRVFDEIVNQMNHYFTIFDQRSNRQKVTKARDKFVSLPTESEYEGAKKTQVGKTEVITNLLMGLHANSAQGDLKVLGLSTFGFFQSSGGLNLSEDAMIVYQSPTGLFERRICLKDI

SEQ ID NO: 281 - protein, 1381 aa, Lactobacillus fermentum
  Lactobacillus fermentum ATCC 14931
MDYVKEYHIGLDIGTSSIGWAVTDSQFKLMRIKGKTAIGVRLFEEGKTAAERRTFRTTRRRLKRRKWRLHYLDKIFAPHLQEVDENFLRRLKQSNIHPEDPAKNQAFIGKLLFPDLLKKNERGYPTLIKMRDELPVEQRAHYPVTNIYKLREAMINEDRQFDLREVYLAVHHIVKYRGHFLNNASVDKFKVGRIDFDKSFNVLNEAYEELQNGEGSFTIEPSKVEKIGQLLLDTKMRKLDRQKAVAKLLEVKVADKEETKRNKQIATAMSKLVLGYKADFATVAMANGNEWKIDLSSETSEDEIEKFREELSDAQNDILTEITSLFSQIMLNAIVPNGMSISESMMDRYWTHERQLAEVKEYLATQPASARKEFDQVYNKYIGQVPKEKGFDLEKGLKKILSKKENWKEIDELLKAGDFLPKQRTSANGVIPHQMHQQELDRIIEKQAKYYPWLATENPATGERDRHQAKYELDQLVSFRIPYYVGPLVTPEVQKATSGAKFAWAKRKEDGEITPWNLWDKIDRAESAEAFIKRMTVKDTYLLNEDVLPANSLLYQKYNVLNELNNVRVNGRRLSVGIKQDIYTELFKKKKTVKAGDVASLVMAKTRGVNKPSVEGLSDPKKFNSNLATYLDLKSIMGDKVDDNRYQMDLENIIEWRSVFEDGEIFADKLTEVEWLTDEQRSALVKKRYKGWGRLSKKLLTGIVDENGQRIIDLMWNTDQNFMQIVNQPVFKEQIDQLNQKAITNDGMTLRERVESVLDDAYTSPQNKKAIWQVVRVVEDIVKAVGNAPKSISIEFARNEGNKGEITRSRRTQLQKLFEDQAHELVKDTSLTEELEKAPDLSDRYYFYFTQGGKDMYTGDPINFDEISTKYDIDHILPQSFVKDDSLDNRVLVSRAENNKKSDRVPAKLYAAKMKPYWNQLLKQGLITQRKFENLTMDVDQNIKYRSLGFVKRQLVETRQVIKLTANILGSMYQEAGTDIIETRAGLTKQLREEFDLPKVREVNDYHHAVDAYLTTFAGQYLNRRYPKLRSFFVYGEYMKFKHGSDLKLRNFNFFHELMEGDKSQGKVVDQQTGELITTRDEVAKSFDRLLNMKYMLVSKEVHDRSDQLYGATIVTAKESGKLTSPIEIKKNRPVDLYGAYTNGTSAFMTIIKFTGNKPKYKVIGVPTTSAVGLKRVGKPGSESYNQELHRIIKSNPKVKKDFEIVVPHVSYSQLIVDGDCKFTLASDTYQHPATQLVLSKESMEIIADDFKFVKENPATADEQLVRVFDEIVNQMNHYFTIFDQRSNRQKVTKARDKFVSLPTESEYEGAKKTQVGKTEVITNLLMGLHANAAQGDLKVLGLSTFGFFQSSGGLNLSEDAMIVYQSPTGLFERRICLKDI

SEQ ID NO: 282 - protein, 1327 aa, Lactobacillus florum
  Lactobacillus florum 2F
MTEQQQPYNIGLDIGTSSIGWAVTDQNDKLLHIRGHNGIGVRLFKEGESAAERRGFRTTRRRLSRRRWRLRFLDRIFDAELAKVDPNFLARLKQSNISPLDPNKQMFGNILFDDPQFDDQKFHQQYPTIYHLRSALAQPDAPQADVRLIYLALHHMIKFRGHFLNGAAVEKFHGGQLHLESEFQELNQIFSNQQRDHVQLQTSSLDEVATILKDNQRTPSDRQRELSARLFVPVDKTIDKENKKLATELLKAVLGLKAKFDVILGVEATDPQAFKLQFSSDDFDDKIAELASELTDEANEILTVLQRLYFSLNLADILTNRQTKQVADSISTAMINRYDDHKHHLKMLKELEAQVTQEQRDGLKKAYDEYIDGDKPTIDTFYTNIKKNLDDSELANQIKSLIDLQAFMPKQRSKENGSIPHQLHQRELDQLIEVQGKYYPWLLAAKDKLDALIAFRVPYYVGPMIDPNQSDDPQNTKFAWMVRKEAGEITPWNFEEKVDKTSSATNFIKRMTTTDTYLLGEPVLPKNSLLYQQFTVLNELNKLKVNGKALTVDQKKYLYEHVCKKQRRVTLKKLSDCLMARGDFPMGAIFTGTTDQKNMNNTLKTYQDFQEIFGDEIDNPDRQVDFEKMIEWSAIFEDREIFKLKLAELNWLTSEQLERVSKKRYQGWGRLSQKLLTHIVNENGERIIDQLWNTNQNFMEIMGQDSVKQAIQEHNGANVAQTGINETIDELYTSPQNKKAIRQILLVVDDIKKAVGYAPANIMMEFAREDRDDHRLIASRARQLEKTYQEISKNWFDNESVTQELKDQIKNKTKFTDRLYLYFIQGGIDLYTGHPLNIDQLSSYDIDHILPQSFLLDNSLNNRVLTSQAENRVHKEDRLPGETVANKMRPTWKMMREQGLMTQRKYNNLTLKPDQISKFNNRGQFINRQLVETRQVIKLAADIMSQKYQADQTKVVTVKANLTHHMREKFNFYKSRNVNDYHHAFDAYLTLFVGNWLLKEYPKLQPYFVYGDFAKTGTNNLKSFNFLYRFERDHKLNDKGAIDTDKDQQLGYMKRIYRFKKMLVTKQLETNEGALYGQTLYPAPKNDKKTRNLINSKKNRPSDIYGGYSNENGSFLTLVKLKKGSKYDYRLVAVPVSKISEIKESELATIEKAIAPQFLKSSGKYRDFQVVLSKILINQKVIDDGMIFTIGSKSYKHNAKQVVLSDNSIQIVSTLSRISDKEKLITVFDEIVDITSKYLPWYKVNDVEKTKMLFRQMQDIDEMKKIIDNSLIGLHCNASITDLGKVGLSKYWGRFVLTAGISLTVDAQLIYQSPTGLFEHRVKVSDL

SEQ ID NO: 283 - protein, 1391 aa, Lactobacillus gasseri
  Lactobacillus gasseri JV-V03
MTKIKNEYIVGLDVGTNSCGWVAMDFQNTILRMHGKTAIGSHLFDAGNSAADRRAFRTTRRRIKRRKWRLKLLEEIFDPYMTEVDPYFFARLKESGLSPLDKRKNVSSIVFPTALEDKKFYCNYPTIYHLRYDLMSEDKKFDLREIYLAIHHIVKYRGNFLYNTPVKDFEASKIDVKDSLEKLNELYERLDSEFTVELDSSNALEIEKIIRDKKVFKINKVKSIHQLLSLKTENKERTKLIKDVSKQIINAILGYKTKFETILLKNISKDEADDWEFKLTDVDADNKFENLIGDLNENEQEILLEIRNLANAITLSNIVEEGKTLSESMIDKYNKHSDDLELLKQVISDHPDRDKAKKLALAYDLYVNNRHGKLLQAKDVLGSKKTLSKEDFYKEVKKNLDDSKASQEILDTIALDSFMPKQRTNENGVIPYQLHQLELDRIIKNQGKYYPFLKEVNPVSSHLKEAPYKLDELIRFRVPYYVGPLISPNESTKNKQTKKNQNFAWMIRKEQGQITPWNFDQKVDRMASANKFIKRMTTKDTYLLGEDVLPANSLLYQKFTVLNELNNIKINGKRISVPLKEELYNNLFKKNSTVTTNKLKSYLKENYNLINVEIKGLADEKKFNSGLTTYNKLRNLKIFDQQLDDLNYDKDFERIIEWSTIFEDKAIYKDKLKTIKWLSDRQIDKLSKIRMQGWGQLSKKLLSQLTDNNGQTIIEQLWDSQNNFMQIVNQSDFKDAIAVANQNLLVNTSVEDILNEAYTSPANKKAIRQVVKVVDDIVKAASGKVPKQIAIEFTRDADDKAKISQTRANKLRKVYKELSNELASETIRNELERVAKDQKLLKDKYYLYFMQLGRDAYTGEPINIDDLGQYDIDHILPQSFIKDDSLENRVLVKKAVNNGKSDNVPVKLYGNRMAADLGMTIRHMWEKWKDQGLITKTKYNNLIIDPDKINKYESSGFIHRQLVETSQIIKLVSTILQSKYPDTEIIVVKARYNHYLRKHLNLYKSREVNDYHHAIDAYLSAICGNLLYQVYPYLRPFFVYGQYKKFSSDPKKEKIIYDKTRKYNFISQIFENKSNDIISLETKKKVFDKKDIIEKLKHAYNYKYMLVSRETETHDQEMFKMTVYPRLSRDTKKSRNLISKKKDMPTEIYGGYTNNSDAYMVIARINKKKGTEYRVFGVPMRELVNLRKAEKNGRYNAYLKQVLEPEIMYSKNGKKNKTISSFEIVKAKVPYKQVILDGDKKFMLASSTYVQNAKQLTLSQNSMQAITDNCENDTEEEKALEEKALIEAYDEILTNIDKYLPLFDINKFREKLHAGREKFINLSLDVKKDTILQVLNGLHDNAVMPKIKSLGLSTPLGFMQFSSGVPLSENAKLIYQSPTGLFEKRVKISDL

SEQ ID NO: 284 - protein, 1386 aa, Lactobacillus hominis
  Lactobacillus hominis CRBIP 24.179
MTKITEDYIVGLDIGTNSCGWVAMDSKNTILRMHGKTAIGSHLFDAGNSAADRRAFRTTRRRIKRRKWRLKLLEEIFDSHLAKVDPYFFARLKESGLSPLDTRKNVSSIIYPTSLEDKKFYVDNPTIYHLRYKLMTEDRKFDLREVYLAIHHIVKYRGNFLYNTPVKAFEASKIDVKGSLKKLNELYEGLDSEFNVELDSNNALEIENIIRDKKIFKINKVKEINQLLSLKTEDKERTKLMKDVSKQIVNAILGYKTKFETILLKDVSKDEADDWEFKLTDVDADNKFENLIGDLNENEQEILLVIRKLANAITLSNIVEEGKTLSESMKDKYKKHSDDLKLLKQVISDHPDRDKAKKLALAYDLYVNNRHGKILQAKDILEKKKTLSKEDFYKEIKKNLDDSKESQEILDAISLDSFMPKQRTNENGVIPYQLHQLELDKIIENQGKYYPFLKEVNPVSSHLKQAPYKLDELIRFRVPYYVGPLISPNESTKNKQTKKNQNFAWMIRKEQGQITPWNFDQKVDRMASANKFIKRMTTIDTYLLGEDVLPANSLLYQKFTVLNELNNVKINGKRISVPLKQELYNNLFKKNSTVTTNKLKSYLKENYKLIKVEIKGLSDEKKFNSGLTTYNKLKNLKIFDQQIDDPNYNKDFERIIEWSTIFEDKAIYKEKLKTIDWLSDRQIDKLSKIRMQGWGQLSKKLLSQLTDNNGQTIIEQLWDSQNNFMQIVNQADFKDAIAVANQNLLVDTSVEDILNEAYTSPANKKAIRQVVKVVDDIVKATSGKVPKQIAIEFTRDADDNAKISQSRANKLRKVYKEMSNELASETIRNELERVAKDQKLLKDKHYLYFMQLGRDAYTGELIDIDNLEQYDIDHVLPQSFIKDDSLENRVLVKKAVNNGKSDNVPVKLYGNRMATDLGMTIRHMWEKWKEQGLITKTKYNNLIIDPDKINKYESSGFIHRQLVETSQIIKLVSTILQSKYPDTEIIVVKARYNHYLRKRLNLYKSREVNDYHHAIDAYLSAICGNLLYQVYPYLRPFFVYGQYKKFSSEPEKEKIIYDKTRRYNFISQIFENKDNDIISRETKKKVFDKKDIIEKLKRAYNYKYMLVSRETETHDQEMFKMTVYPRLSRDTKKSRNLIPKKKDMPTEIYGGYTNNSDAYMIIARINKKKGPEYRVFGVPMRELVNLRKAEKNGHYKAYLKQVLEPEIMYSKNGKKNKTISSFEIVKAKVPYKQVILDGDKKFMLASSTYVQNAKQLTLSQYSMQAITDNCENDTEEEKALVEAYDEILTNIDKYLPLFDINKFREKLHAGREKFVDLPLAEKKETILQVLNGLHDNAVMPKIKSLGLSTPLGFMQFHTGVSLSENAKLIYQSPTGLFEKRLKISDL

SEQ ID NO: 285 - protein, 1369 aa, Lactobacillus iners
  Lactobacillus iners LactinV 11V1-d
MNNNYYLGLDLGTNSVGWAVTDDHYNIIKFHGKHMWGMRLFEEAETAKDRRLHRQARRRRQRLVERINLLEELFDKEISKVDQGFFARKKESDLHFEDKTTKSEYALFNDKSYTDRDYYKQYPTIFHLIMDLIENDKKRDIRLVYLACHYLIKHRGHFIFDGKNFTVDNSFENLLDKLITYLKDNDDITLSFPKDQLINIFKNSNLNSTEKSDQLKPFFGRTNLEKGIIKLLSGGKQDLSNMFRDETLKNSNYKNLKFSDNRFDDERDGYAADLGDRIDLLILLKQIYDASILESMMSQARVSIDGHKYISSAKVCAYEKHKSDLKRLKSLIKKYLPSEYNNIFRKITEKDNYVAYSKSNITNNKREKALKYVKYVDFTKYLTKKLKTIKTQDAEDDQEIFEIKGELEKQSFLPKQRTLDNSIIPYQLHLMELKKILDNQSKYYDFLLAKDDQEGITVKDKIISLLTFRLPYYIGPVNPAVHGKFAWVKRLANGKVTPWNYKEKIDIDASHEEFIKTKLSKCSFLIGCDVLPKNSLLYQKYMVLSELNTIKFNGVNISEKLKDDIYQNLFKNIQKVTKKRLQNYIKEHENIIGDVIVTGIDNAFKQGLVSYLKFKKIIGDKVDDDRYQKVLEKIIRDITLYDECAGKKIKKEYKDSDLFTEDELNKIVKLTFNDWGRLSAELLDQLEGEDTVSGETGKIIEFMQKHNYNLMQLMSKKFTFKSKIDEINKSYYQHDKFNYKSMIDSLYVSPATKRILWQSLKVVHEISKIMKHDPEKIFIEMARSKEDHPKRKLSRKADLKQVYKDSKKQIISIIGKDKYQDLSNELDNKDDRDLRWDNLYLYYTQLGRSMYSLKPIDISELMNKNLYDQDHIFPKSKKYDDSIENRVLVEKELNVKKSDIYPISDANIIPQKIKGQVESFWKMLYDHKLIGDKKYARLIRSKAFTDDELAGFIARQLVETRQATKETADLLKRLCPKSRIVYAKAQNASIFRQKFDIPKSRTINDLHHAQDAYLNIVVGNIFDTKFTQDPRNFIKNTKDSRNYNLEKIYDYNVERNNYVAWIAPDGETNGTIANVKCNLSTKDFRVTRPSFYKKGALFNQNLSRKGSNLAPIKEHSPKSNPLKYGGYSGKNNSFFVVVAGKDNKGKDIVKLIPVNTLIYNKMLHCDYKAKQELLTSYVANNFAINNFRIVKDDIKMYSLVKIDGAYYYLVGGTDERIEVKNAMQLLLSKDSIKAVKILEKESKDQFANIKNYKDIDIKLGRTFNEVVSKYTNSVFGKSMLISDKYRKDIFKSVEKSILEFNHLDTIGKADNLLKFVTLMRPSGSAHSLKMVGLIERIRKSNVISNFNEFKLINQSVTGLFENEEDLLKL

SEQ ID NO: 286 - protein, 1391 aa, Lactobacillus jensenii
  Lactobacillus jensenii 269-3
MKEIKDYIIGLDIGTNSCGYVVTDKQNNILKLKGKTAIGARLFKEGEAAADRRAFRTTRRRLARRRWRLSLLEEIFDEEMNKVDPSFFRRLKESDYSPKDRRKQFNSIVFESSEADKAFYEKYPTIYHLRNALMHDNQKHDLREIFLAVHHIVKYRGNFLREDSVKAFKAAKFTLQGEDGIGPVDKLNDLLKEIYIEAAPELATDNLSKIEDIIKDKKLYKQDKLKQIANLLPKAVDSKDKAKLNKDIAKQVANALMGYMFRLDTLFSFTDVDVKDYKLKFSDANIDESLDALTSLLTDAQIEFVLELQSIYNTIVLNEIVPDGMSLSESMVKKYDDHKKDLKLYKEYIDSLSDQKKAKQLEAAYALYVNYRKADLLAAKKLFEKKKIGDKKFVDVISNFEVFGKFVSDNLDDSELANKIKARLDLGEFLPKQRTNQNGVIPYQLHQVELTQILEKQGKYYPFLITPNPVESHRNNAPYEISELVSFRVPYYVGPLIDNQSIKDKQNKNKFAWMVRQKQGQITPWNFEEMVDTTESANQFIKRMTRKDTYLLAEDVLPKSSLIYQKFMILDELNRIKIDGKKLTSKLKHDIFEKLFKKQKSINLDNLKNYLLAEGNIPGLIEGLSDGINFNNSFSTYIDYRNIFGDEIDNPNKQADFEKMIEWSTVFEDRKIFKRKLKEITWLTPEQIKQVSSKRYSGWGRLSKKLLTQITDENGVNILQRLWNEPETLTEVLANPVIKRKISEANSLFVQINKVENILDDAYTSPQNKKAIRQVIRVVDDIIAAAHGKKPSQIAIEFARSSQNKAKVPDTRKKQLDKIYNKISSEILDSSIKNELKNLKSNKYLSKDKLFLYFKQMGRDAYTGDKLSLDQLQNYDIDHIFPRSFIKDDSLDNRVLTQKPINAKKSDYGIPALEFGNKYVPDLGITVKEMWKLWQENGLISKSKLINLCTNPKKIGSKRASGFINRQLVETSQVIKLVAIILQAEFPDTEIIEVKALQNTTLRESFHLYKNRSVNDYHHAIDAYLTTIVGNYLYQVYPKLRPYFVYGQFKKFNQEKNIDILKRLKNFNFLRQLIFNTDDNIYISGTKEIVFNKKDIIHKLETAYGYKYMNISRECYQETSSLFNQTLYAHNSSVKNSLIPKKKGLPTEIYGGYSGNKDSFFVLVKIVKKRTNLYRIVGIPTRELAKLNSSNNYNQALNKIVESKLCLKETESFKILIKRLLYGTLIVDNGQKFRIGSFKEKHNVQQLVLQLKSMKYIKFYIDGGQNYFTDVERKKLEKQDRDKCLLYVFDDIMNVVNKRFTLFDMSKYEKDGDSLREKFNCLDFNDKVSILSDLLKAFHANSDRTSITKLKITNLGRHQAGKNGITLTTNAQIIYQSPTGLFERRIKIKDL

SEQ ID NO: 287 - protein, 1395 aa, Lactobacillus jensenii
  Lactobacillus jensenii 27-2-CHN
MKEIKDYIIGLDIGTNSCGYVVTDKQNNILKLKGKTAIGARLFKEGQAAADRRSFRTTRRRLARRHWRLGLLEEIFDPEMEKIDPNFFRRLKESDYSPKDSRKQFNAIVFKSIKADKRFYKKYPTIYHLRNALMHDNQKHDLREIFMAVHHIVKYRGNFLREDSVNAFKAAKFSLRGEDGIGPVDKLNDLLKEIYSEYSPELATNNLSKIEDIIKDKNLYKQDKLKQVATLLIKEADSKDKAKLNKDIAKQVANSFMGYMFRLDTLFSLTDVDVKDYKLKFSDANIDESLDDLTSLLTDAQIEFVLELQSIYNTIVLNEIVPDGMSLSESMIKKYDDHKEDLKIFKEYIDSLSDQKKAKKLLSAYNLYVNYRKSDLVEAKNLFKNKKVGDKNFADVISNFEVFGKFVSDNLDDSELANKIKARLDLGEFLPKQRTNQNGVIPYQLHQVELTQILEKQGKYYPFLITPNPVESHRNNAPYEISELVSFRVPYYVGPLIDNQSIKDKQNKNKFAWMVRQKQGQITPWNLEEMVDTTESANQFIKRMTRKDTYLLAEDVLPKSSLVYQKFMILDELNRIKIDGKKLTSELKHDIFEKLFKKQKSINLDNLKNYLLVEGNIPGLIEGLSDGINFNNSFSTYIDYRNIFGDEIDNPNKQADFEKMIEWSTVFEDRKIFKRKLKEITWLTSEQIKQVSSKRYSGWGRLSKKLLTQITDENGVNILQRLWNEPETLTEVLANPVIKRKIVEANSSFTKAKDMKDILVEAYTSPQNKKAIRQVMRVVDDIIAAAHGKKPSQIAIEFAREDQDNPQMTKSRKAQLDQIYAKISDEFLDDAVKNELKNMKDNKPLAKDKVFLYFKQMGRDAYSGEKLSLDNLQDYDIDHIYPQSFIKDDSFDNRVLVQRAYNNGKSDNVPVLLFGNKIAAGLGITIRQMWKKWLELGLISKRKFNNLITDPEKISRNMASGFVNRQLVETSQVIKLVANILQAKLPDTEIIEVKASYNSILRKEFNLYKSREVNDYHHAIDAYLTTIVGNYLYQVYPKLRPYFVYGQFKKFGKAENQEDDPVKKIKKFNFIYQLIWGKDDAICISHTNQQVFSKKDIIDKLTTAYNFKYMNISHAVYTRNNNMFKQTLFPIIERTTAKTKSLIPKKLDRPTDIYGGYSNNNDAYLALVKVDKKRGSEYRVVGIPMRAAAMLKASKNYDEDLRKVIEPMVMFDKNGKAKRGIEGFRVLVGKMPFKQAVLDGNKKFMLTGTVDTPNLKQLVLSQQNMKYILDYIEDVDCRKHKFGDKVQNPDKCLLEVFDEIIEIVDKYFELFDSRDFREKLRNSRNKFIKLEASKKADTILAILKGLQAKSTRATIKELNISDFGRIITSSISPEAQLIYQSPTGLFERRVKVKDL

SEQ ID NO: 288 - protein, 1375 aa, Lactobacillus johnsonii
MTKIKDDYIVGLDIGTDSCGWVAMNSNNDILKLQGKTAIGSRLFEGGKSAAERRLFRTTHRRIKRRRWRLKLLEEFFDPYMAEVDPYFFARLKESGLSPLDKRKTVSSIVFPTSAEDKKFYDDYPTIYHLRYKLMTEDEKFDLREVYLAIHHIIKYRGNFLYNTSVKDFKASKIDVKSSIEKLNELYENLGLDLNVEFNISNTAEIEKVLKDKQIFKRDKVKKIAELFAIKTDNKEQSKRIKDISKQVANAVLGYKTRFDTIALKEISKDELSDWNFKLSDIDADSKFEALMGNLDENEQAILLTIKELFNEVTLNGIVEDGNTLSESMINKYNDHRDDLKLLKEVIENHIDRKKAKELALAYDLYVNNRHGQLLQAKKKLGKIKPRSKEDFYKVVNKNLDDSRASKEIKKKIELDSFMPKQRTNANGVIPYQLQQLELDKIIENQSKYYPFLKEINPVSSHLKEAPYKLDELIRFRVPYYVGPLISPNESTKDIQTKKNQNFAWMIRKEEGRITPWNFDQKVDRIESANKFIKRMTTKDTYLFGEDVLPANSLLYQKFTVLNELNNIRINGKRISVDLKQEIYENLFKKHTTVTVKKLENYLKENHNLVKVEIKGLADEKKFNSGLTTYNRFKNLNIFDNQIDDLKYRNDFEKIIEWSTIFEDKSIYKEKLRSIDWLNEKQINALSNIRLQGWGRLSKKLLAQLHDHNGQTIIEQLWDSQNNFMQIVTQADFKDAIAKANQNLLVATSVEDILNNAYTSPANKKAIRQVIKVVDDIVKAASGKVPKQIAIEFTRDADENPKRSQTRGSKLQKVYKDLSTELASKTIAEELNEAIKDKKLVQDKYYLYFMQLGRDAYTGEPINIDEIQKYDIDHILPQSFIKDDALDNRVLVSRAVNNGKSDNVPVKLFGNEMAANLGMTIRKMWEEWKNIGLISKTKYNNLLTDPDHINKYKSAGFIRRQLVETSQIIKLVSTILQSRYPNTEIITVKAKYNHYLREKFDLYKSREVNDYHHAIDAYLSAICGNLLYQNYPNLRPFFVYGQYKKFSSDPDKEKAIFNKTRKFSFISQLLKNKSENSKEIAKKLKRAYQFKYMLVSRETETRDQEMFKMTVYPRFSHDTVKAPRNLIPKKMGMSPDIYGGYTNNSDAYMVIVRIDKKKGTEYKILGIPTRELVNLKKAEKEDHYKSYLKEILTPRILYNKNGKRDKKITSFEIVKSKIPYKQVIQDGDKKFMLGSSTYVYNAKQLTLSTESMKAITNNFDKDSDENDALIKAYDEILDKVDKYLPLFDINKFREKLHSGREKFIKLSLEDKKDTILKVLEGLHDNAVMTKIPTIGLSTPLGFMQFPNGVILSENAKLIYQSPTGLFKKSVKISDL

SEQ ID NO: 289 - protein, 1382 aa, Lactobacillus mucosae
  Lactobacillus mucosae LM1
MDIGTNSIGWTAIDDHFSLLRVKGKNAIGVRTFKEGETAADRRGFRTARRRLSRRRWRLQFLDEFFAPYLAEVDPNFLARLKQSDISAKDPAKNQEYMGKLLFPDQEAASDGNGYPTLIQMRKAMPAEKAADFPVFNIYQLRYALMNEKRKFDLREIYLAVHHIVKYRGNFLNNTSVDKFKADQIDFNKSFETLNDLFRQVQPIAPFQIDLTKVDELGKLLLDTKQKKLDRQKAVAKLLPLIEDGTDKEIVKAHQQTAREISKLILGYKAKVGLILQNNLDQTLDMSTENSDDQLMQIAEELDDYQMELINQLSLLYSQIMLNEIVPNGETVSASMLNRYYKHRCQLKELKDYGAAQDKKTREQLDHLYAEYIGQIPKDSKFDFTKDLKKLMDKSDLGQKIKDEIEAGDYLPKQRTSANGVIPHQMHQQELDQIIENQKEYYPWLAEPNPVEKNIKNAKYKLDQLVSFRVPYYVGPMITLADQQKTSKASFAWAVRKKAGKITPWNFYDMIDREKSANNFIKRMTNKDTYLLSEDVLPASSLLYQKFTVLNELNNIRVNGRKLQPALKQAIYTDLFQKRKTVNLKTLTNFLAIHEPTLTKPKIEGLSNGRSFNSSLGTYIDMSKILGDSLDDLNYRDDIEKIIEWSTVFEDSEIYGVKLQEIQWLTNEQREKLVRKRYQGWGRLSKKLLTGITDENGQRIIDLMWDTSKNFMQIVHQPVFEEQIAELNQQLLQDADKAPLEVVDDILADAYTSPQNKKAIRQVVKVVADVVKAVGNAPASISIEFARNEDRNKELKNSRRHSIEKLYHETAEKLVKQTNLLEELGNVKDLNDRYYLYFTQAGRDMYDGTPINIDEISTHYEIDHILPQSFLKDNSLDNRVLVKKSENAAKSDRVPAKLYGAKMRAFWKQLKESQLISNRKYLNLTTDPEQVDKYQMQGFVHRQLVETRQIIKLAANIFGSLYPDSAVIETRAELTKQLREKFSLYKVRDVNDYHHAVDAYLTAFAGHYLYQRYPKLRPMFVYGDYAKIYADDLKRLRSVNLFHDLEKDQYNSGTAVNPETKEKIVDVDWLSDYVSKIQHFKYMLISKAVYTQHGQLYGATILPVAQVDKISAPIGIKDDKPVDIYGAYTNEVAAYMAIVRVNGKKPKYKVVSVPVRMLQRLKMAEQKGHDQYMQTLHDVLLRNFTSLKKNRKTGLKEAVVKDFDVLVPCVRYNQLVIDGDTKFTLGSATYQHNAKQLVLCNHSLETLANNFEYVRKHPDEADERMIMLYDDILDQVNHYFTLYDKNKFREKLNAGRDKYLKLPTFSQFENNKKTAIGKSEAIINILRGLHANAAITNLKCLGVSTPFGQLQSPSGIELSENAKLVYQSPTGLFSREVLLKDL

SEQ ID NO: 290 - protein, 1362 aa, Lactobacillus paracasei
  Lactobacillus paracasei subsp. paracasei 8700:2
MTKLGKPYGIGVDIGSNSIGFAAVDENSHLIRLKGKTVIGARLFEEGKAAAKRRAGRTTRRRLSRNRWRLSFLRDFFESHITPTDPNFFMRQKYSEISPKDKARYKYEKRLFNDRTDAEFYQQYSTMYHLRNRLMTDPSRADVREIYFAIHHILKSRGHFLTPGDAKDFNTNDVALDEIFPALQDAYAQVYPDLGITFDEDKANEFKTILLNEIATSIDTQRALVKLLLAEEDDKDILKQQKQVLTEFAKAVVGLKTKLNLALGTEVDSSEATAWNFSLGQLDDKWAGIESAMTDEGTEILDQIRDLYRARLLNGIVPTGKTLSQAKVDDYTQHHEDLQLFKAYLKQLEDDGTAKAIRQLYDRYIDGDDAAPFLRENFVKALTKDVTAHPNTKSPELLERLAQPDFMLKQRNKANGAIPVQMQQRELDQIIKNQAVYYDWLAAPNPVEKHRKSMPYQLDELLNFRIPYYVGPLVTAKEQKAAQGGVFAWMVRKDPEGNITPYNFDEKVDREASANTFIQRMKTTDTYLIGEDVLPKQSLLYQRYEVLNELNNVRVNNEKLSIEQKQQVIRELFERHNSVTIKQFAENLRAHGDYAHIPEIRGLADEKRFLSSLSTYRQLKSLLPEAIDDPAKQADIENIIAWSTVFEDAAIFKTKLKEISWLGSEAITKLSNIRYRGWGQFSRKFLNGLTLGNGHTIIQELLLSTNNLMQILTDETLQKKMTELNADKLKTANINDAIDNAYTSPSNKKALRQVLRVVDDIKRAADGQDPSWLYVETADGGGTPGKRTRARQHQLQEIYANAAHELIDTAVRGELEDKISDKADFNDRLVLYFMQGGRDIYTGAPLNIDQLSSYDIDHILPQSLIKDNSLDNRVLVHAIINREKNATFASTIYAQKMNATWRQWHEAGLISGRKLRNLQMRPDQIDKYASGFVARQLVETRQIIKLTEQIVAAQYPDTKIIAVKAGLSHQLREELEFPKNRDVNHYHHAFDAFLAARIGTYLLKRFPNLQAFFTYGKFTKADVKKLRGFNFIRDITHAEDKIVAKDTGEVVWDKQRDVDELDRIYNFKRMLITHEVRFETADLFKQTVYGARDSKEAGGSKQLIPKKKGYPVDIYGGYFRENTAYLAVVKVTKKTETIFKVVKIATSQVAALNKARSRSTAEELSVLTELLKPKFSKVGKNGKITDTPFEVVLPRVPREQLFYNAKYGFFMVNSDTMFHNFQEIWVSRSDQKILQQIRKAKIDYPNVDQDLDNLFHNLADQIVKYFDLYSIAGFKEKISQSQNTFNDLAVDDTDQSVGKITVINELLKGAQANGMTGSLKVLKISTPFGFTQDKSGVLTKDSSIIYQSPTGLFERSVRLTDL

SEQ ID NO: 291 - protein, 1382 aa, Lactobacillus pentosus
  Lactobacillus pentosus IG1
MKKIVNYNLGLDIGTSSIGYAAIDDQGRPVRHQNKTVMGVRLFKEGKTAESTRIFRGTRRRLSHRHWRLGYLDRIFDNEIAKVDENFLPRLKASKRARSDEKRSFRGSLLFPETGDDAYYQKYPTIYHLRYALITQKKQFDIRLIYLALHHMIKYRGNFLDTTPVSAFNIHDIDLTDQFASLNDCYQLLDMDFEFQFDLNNIEQVQKLLLDETLSKTKRQAAVSKVLVMSTGNKAFDDQQNGIASEFIKALLGGPFDLSKILNLSVADVKSWKLHMTDKDVDDTLNSLVEELDENHKQIVNLLQMIYSQVMMLGLLNGQQSISASMIERYDDHAKHWAALKKLLPALGEQEQSTIIHAYTAYTGHSRTKQLSRAEFYTKVNSILKKHENIAEATGLIELIDRNEFMPKQRDAVNGVIPHQLHQRELQLIIQNQQKYYPFLAAKAYPDADETMIEQLLSFRVPYYAGPLVDRDFINESSDQEQAMQNTKFSWLKRREAGEITPWNFEQKVDVQETANRFIKRLTTKDTYLMTEDVLPKESLIYQRFEVLNELNAIRINDRRLTAENKQLAFQQLFMAGNTKNVSIKKFRNFVFDSLKFPEKVKITGFAGQHNFLAKLSTYHDFKKIFGERVDHTDLQPDFERIVEWCTIFEDRHIYREKLKEIQWLSQSEIDQLVLIRNHGWGRLSKRLLTGIRDSDGRTVMDQLWFGTDNFMRIISQSDFAAAIANENRTQLNQHGLEDVLDSAFMSPQNKKAIRQVLKVVDDIEQTLGCPPKKVMIEFTRSPDKKKQRTVTRLEKVQQAYKAVADQLAGQSIVSELDQYANTHSKLSDTYYLYFMQLGRDLYSGKPIDIDSPMLDDDHILPRAFMKDNSLDNRALTEKPINNTKAAKFPSKVFGQQKEVTDFWKLLRRCGLMSNIKEKHLYLDPDNVDKWTRRGFIHRQLVETSQVIKIVANILNDRYQQSQTEVLEVPARLGTELRECFGWYKVREVNDYHHVFDAYLAAFIGNYLYRRYPKLQPYFVYGNFAELNKAQLKNIKSFNFLYNITDNKRVVKDIETGQTLWDDQIRQQIQHIYEYKYMLTSHEAFTQHKELYGQTIYPRREFKPGTLKAIKQDQPQELYGGYKNLTAAYMCIVKIQARKRRAAEYRVVRVATESLSALQQAKRLGVQAYERCLRQELVRNNEILRTNADPNSAPREFEVLLDRVLCHQMIISDGQKYLLGSHAYKINCMQLVLSNNSMKILSTSIVKLKQMTNEPLVQVYREILDVVNKYFTLYDVNSFRENLNQFFDKFRTLPITNEYESSKSGKKLIHRGQLETLTLILRGLHANSDKVQYGDQSTLLGGFQTKDGIKLSKDSVIQYTSPAGLNVRTVKLRDLEQKEAQK

SEQ ID NO: 292 - protein, 1361 aa, Lactobacillus pentosus
  Lactobacillus pentosus KCA1
MNEPYGVGLDIGTNSVGWTVVDMNGRVRKVKGKTALGARLFKEGATAEDRRGFRTTRRRLKRVKWRLRLLREFFDQPISKIDPNFFARRKYSDISPRDPNYNGLAKTLFNDRTDKEFYDDYATIYHLRDKLMTSNRKFDIREIYLAIHHIVKYRGNFLRTGPASQYGSASLHLATSFQKLNDLFAQSEETLNLKLVTDEALLQQIQQILVRTDLSRSEQQRQIWPLMAVLTGASAAEKKRQKNVVVELSKALVGLKAKMNVVTLTEVDAAVVKDWTFTMEESQDKLPEIEEQLSEVGQQIMDEVIQLYASVNLAQLIPAGKRFSQHMVEKYKHHEKNLELLKAYIHSQSDSKRGREIRATYDRYIDGVDSKPVTQEMFYKDLMKYVEADATSNHLAAEIKDEIDSEQFMPKLRTKQNGSIPYQVQQYELDQIISHQKKYYPWLGEENPVAERRGKFPYKLDELVGFRVPYYVGPLITKEDQQATSGAGFAWMVRKADGPITPWNFDQKVDRIASATAFIQRMQTTDTYLIGEDVLPARSLIYQRFMVLNELNNMRVEDRKLAPQQKQRLYNQVFKQHQHVSVKNIQQNLMDAGEYRKTPQITGLADPKGFNSSLSTYHDFKKILLEAIADEHKRADIEKIILWSTTFEDSAIFKQKLEEVAWLTDAQRKQLSGLRYRGWGQLSHKLLTAFKDDKGRSIMDGLWETSDNFMQLRKQPAIETQIKEANQANLTDADIQDTINELYTSPQNKKAIREVMLVLDDIKNAMHGQTPSWIFVEAARGGGVAGRRTQSRSSQIVEAYKGTAKEIVSEKVQHELNEKIKAKADFNTRLVLYFLQNGRDLYTNEAINIDRLSEYDIDHILPQSLVKDDSLDNRVLTSARINREKNDTFASEKFGRKMGAQWRELHRNGLMTQRKLKHLLMRPDEISKHATDFINRQLVETRQVIKLVEELISSEYPAASIVAVKANLTHQFRQTFNFPKLREVNDYHHAFDASLTAFIGMYLLKQYPKLERFFVYGKFAKQPINLTRFNIIRKLAVAEKPIANIETGEILWDKTADIKYFEKLYNYKRLLVTHEVRENYGAMFKQTLFKASYNKSKTLVPKKNHMETSVYGGYSNQETAYLAIVRIPFKSGFKFIVVGIPTRMVAKIKHYQSLGATLNQATHKVIEPKFTKISRKTKQTVISDYEVVLPKVYLDQVVRDQVKGQMYRFSLGSDKEYHNVQELYLPLSIQQAFVGHYDESDDQRSNDLVKVYDAALKQLQRYFPLHLSRNFDQVASQAHQSFEGLKNNVQTSDKQLGKKEVLNSLFVGLHANATRSNLSVLGMSKDFGRIKSNGITLTDQAEIIYQSPTGLFERKVALKDL

SEQ ID NO: 293 - protein, 1358 aa, Lactobacillus pentosus
  Lactobacillus pentosus MP-10
MNEPYGVGLDIGTNSVGWTVVDMNGRVRKVKGKTALGARLFKEGATAEDRRGFRTTRRRLKRVKWRLRLLREFFDQPISKIDPNFFARRKYSDISPRDPNYNGLAKTLFNDRTDQEFYHDYPTIYHLRDKLMTSDRKFDIREIYLAIHHIVKYRGNFLRTGPASQYGSASLHLATSFQKLNDLFAQSEESLNFKLVTDEAQLQQIQQILVRTDLSRSEQQRQIWPLMVVLMGATAAEKKRQKDFAKELANALVGLKAKLNVVTLTNVDTTVVKDWTFTLEESQDKLPEIEEQLSEVGQQIMDEVIQLYASVNLAQLIPAGKRFSQHMVEKYNHHEKNLELLKAYIHSQSDSKRGREIRATYDRYIDGVKSKPVTQEMFYKDLMKYVEADATSNHLAAEIKDEIDSEQFMPKLRTKQNGSIPYQVQQYELDQIISHQKKYYPWLGEENPVAERRGKFPYKLDELVGFRVPYYVGPLITKEDQQATSGAGFAWMVRKADGPITPWNFDQKVDRIASATAFIQRMQTTDTYLIGEDVLPARSLIYQRFMVLNELNNMRVEDQKLAPRQKQRLYNQVFKQHQHVSVKNIQQNLMDAGEYRETPKITGLADPKGFNSSLSTYHDFKKILPEAIADEHKRADIEKIILWSTTFEDSAIFKQKLEEVAWLTDAQRKQLSGLRYRGWGQLSHKLLTAFKDDNGRSVMDGLWETSDNFMQLRKQPAIETQIKEANQANLTDADIQDTINELYTSPQNKKAIREVMLVLDDIKNAMHGQTPSWIFIEAARGGGVAGRRTQSRSKQIVEAYKSTAKEIVSEKVQHELNEKIKAKADFNTRLVLYFLQNGRDLYTNEAINIDRLSEYDIDHILPQSLVKDDSLDNRVLTSARINREKNDTFASEKFGRKMGAQWRELHRNGLMTQRKLKHLLMRPDEISKHATDFINRQLVETRQVIKLVEELISSEYPSASIVAVKANLTHQFRQTFNFPKLREVNDYHHAFDASLTAFIGMYLLKQYPKLERFFVYGKFAKQPINLTRFNVIRKLAVAEEPIANIETGEILWDKTADIKCFEKLYNYKRLLVTHEVRENYGAMFDQTIFKATDSRKRLIQKKKGFATETYGGYTGRTLAYLAIVKVVTNKDTQYQVVGIPTTMVTQIQQLEASGLTSKQAVTKAIGAMINENNKKLQSYEVLLPKVRFEQVVRDEVKGHIHRFALGTDTYYHNIQELYLPLTIQRAFLGKRNDTDAQTEQNLLTVFETTLAQVNRYFPLYEMNKFKQILNSAQEKFAALPTKNKTVKNKLVTGKDGVLNNLFIGLHANASLGDLKILGMKIGFGKLQVPGGLKLTDQAEIIYQSPTGLFERKVALKDL

SEQ ID NO: 294 - protein, 1358 aa, Lactobacillus plantarum
MKEPYGVGLDIGTNSVGWTVVDASGHVRKIKGQTGIGVRLFKEGAAAADRRGFRTTRRRLKRVKWRLRLLREFFDQPISKVDINFFARRKYSDVSPRDPNYNGLEKTLFNDRSDQDFYHDYPTIYHLREALMTQHRKFDVREIYLAIHHIVKYRGNFLRNDAATAYRSGTLDLQQHFETLNHLFSQADLELNLNLTTDVALLDSIKQTLVRTDISRSDRQKLIMPLLAVLTGATTAEKKRQKAVVTEFAKALVGNKTKIDVLTLTDIDATEAKDWAFSLEENQDKLPGIEDRFSEVGQQIIDEVIRLYASVNLAQLIPEGKRFSQSMVEKYKRHGEDLKLLKAYIRSQSDAKRGRAIRATYDQYIDGVKSKQVTQEAFQKALGKFVDADVDLNSWAAQIKQAIDSEQFMPKLRTKQNGAIPYQVQQNELDQIISNQKEYYPWLGEENPVIKRRGKFPYKLDELFGFRVPYYVGPLITKEMQAATANAGFAWMVRKADGPITPWNFDDKVDRVASATAFIQRMQTTDTYLIGEEVLPARSLIYQRFMVLNELNNIRVDDGQLTPRQKQRLYNQVFKKHKRVTAKNIQDNLVAAREFPTAPRITGLADPKVFNSSLSTYHDLKQVLPEAMSDVRKQADIEKIILWSTIFEDSTIFKQKLTEISWLTAAQLKQLGQLRYRGWGQLLRKLLTGLKDDNNRSIMDGLWETNANFMQLRSQPAIENQIKSANQANLTTADLQDTINELYTSPQNKKAIREVMVVLADIKDAMHGQTPNWIFVEAARGGGVAGRRTQSRSKQIVAAYQGTAQAIVRDQVQRELKEKIKNKANFNTRLVLYFLQNGRDLYTGDAINIDRLSEYDIDHILPQSLVKDDSLDNRVLTNARINREKNDTFASEKFGKKMGAKWKEMHRMGLMTKRKLDHLLMRPDEISKYATGFINRQLVETRQVIKLVEELINAEYPSTAIVSVKANLTHQFRQTFDFPKIREVNDYHHAFDAALTAFIGTYLLKRYPKLERFFVYGKFAKQPVNLTRFNVIRKLAKTDTPITDIDTGEVLWDKLTDIKYFETLYDYKRLLVTREVSENYGAMFDQTLLKASDNGKRLIRKKQSFDTAIYGGYTGKTLAYMAIVKVSTKKDVQYQVVGVPTTMVTQIEQLEQQGMTNKQAVTKVIEPLIAANNKKMLTYEVLLPKVRFEQVVRDRIKGQTHRFALGTDTYYHNIQELYLPLTLQRAFLGKQNESEVQLNQNLLTVFDATLAQVNRYFPLYEMNKFKKILNSARDQIELLEAKNQFVKNKLVLGKQGILTNMFIGLHANASYGDLKVLGVKIDFGKLQVPGGIKLTGDAEIIYQSPTGLFERKIALKDL

SEQ ID NO: 295 - protein, 1363 aa, Lactobacillus rhamnosus
MTKLNQPYGIGLDIGSNSIGFAVVDANSHLLRLKGETAIGARLFREGQSAADRRGSRTTRRRLSRTRWRLSFLRDFFAPHITKIDPDFFLRQKYSEISPKDKDRFKYEKRLFNDRTDAEFYEDYPSMYHLRLHLMTHTHKADPREIFLAIHHILKSRGHFLTPGAAKDFNTDKVDLEDIFPALTEAYAQVYPDLELTFDLAKADDFKAKLLDEQATPSDTQKALVNLLLSSDGEKEIVKKRKQVLTEFAKAITGLKTKFNLALGTEVDEADASNWQFSMGQLDDKWSNIETSMTDQGTEIFEQIQELYRARLLNGIVPAGMSLSQAKVADYGQHKEDLELFKTYLKKLNDHELAKTIRGLYDRYINGDDAKPFLREDFVKALTKEVTAHPNEVSEQLLNRMGQANFMLKQRTKANGAIPIQLQQRELDQIIANQSKYYDWLAAPNPVEAHRWKMPYQLDELLNFHIPYYVGPLITPKQQAESGENVFAWMVRKDPSGNITPYNFDEKVDREASANTFIQRMKTTDTYLIGEDVLPKQSLLYQKYEVLNELNNVRINNECLGTDQKQRLIREVFERHSSVTIKQVADNLVAHGDFARRPEIRGLADEKRFLSSLSTYHQLKEILHEAIDDPTKLLDIENIITWSTVFEDHTIFETKLAEIEWLDPKKINELSGIRYRGWGQFSRKLLDGLKLGNGHTVIQELMLSNHNLMQILADETLKETMTELNQDKLKTDDIEDVINDAYTSPSNKKALRQVLRVVEDIKHAANGQDPSWLFIETADGTGTAGKRTQSRQKQIQTVYANAAQELIDSAVRGELEDKIADKASFTDRLVLYFMQGGRDIYTGAPLNIDQLSHYDIDHILPQSLIKDDSLDNRVLVNATINREKNNVFASTLFAGKMKATWRKWHEAGLISGRKLRNLMLRPDEIDKFAKGFVARQLVETRQIIKLTEQIAAAQYPNTKIIAVKAGLSHQLREELDFPKNRDVNHYHHAFDAFLAARIGTYLLKRYPKLAPFFTYGEFAKVDVKKFREFNFIGALTHAKKNIIAKDTGEIVWDKERDIRELDRIYNFKRMLITHEVYFETADLFKQTIYAAKDSKERGGSKQLIPKKQGYPTQVYGGYTQESGSYNALVRVAEADTTAYQVIKISAQNASKIASANLKSREKGKQLLNEIVVKQLAKRRKNWKPSANSFKIVIPRFGMGTLFQNAKYGLFMVNSDTYYRNYQELWLSRENQKLLKKLFSIKYEKTQMNHDALQVYKAIIDQVEKFFKLYDINQFRAKLSDAIERFEKLPINTDGNKIGKTETLRQILIGLQANGTRSNVKNLGIKTDLGLLQVGSGIKLDKDTQIVYQSPSGLFKRRIPLADL

SEQ ID NO: 296 - protein, 1361 aa, Lactobacillus rhamnosus
  Lactobacillus rhamnosus HN001
MTKLNQPYGIGLDIGSNSIGFAVVDANSHLLRLKGETAIGARLFREGQSAAERRESRTTRRRLSRTRWRLSFLRDFFAPHITKIDPDFFLRQKYSEISPKDKDRFKYEKRLFNDRTDAEFYEDYPSMYHLRLHLMTHTHKADPREIFLAIHHILKSRGHFLTPGAAKDFNTDKVDLEDIFPALTEAYAQVYPDLELTFDLAKADDFKAKLLDEQATPSDTQKALVNLLLSSDGEKEIVKKRKQVLTEFAKAITGLKTKFNLALGTEVDEADASNWQFSMGQLDDKWSNIETSMTDQGTEIFEQIQEHYRARLLNGIVPAGMSLSQAKVADYGQHKEDLELFKTYLKKLNDHELAKTIRGLYDRYINGDDAKPFLREDFVKALTKEVTAHPNEVSEQLLNRMGQANFMLKQRTKANGAIPVQLQQRELDQIIANQSKYYDWLAKPNPVEKHRASKPYQLDELLTFRIPYYVGPLITPKEQAESRENVFAWMIRKDPSGNITPYNFDEKVDCPASANMFIQRMKNTDTYLIGEDVLPKRSLLYQKYEVLNELNNVSIDGRRLGADQKQRLIREVFERHSSVTIKQVAENLVAHGDFAKRPEIRGLADEKRFLSSLSTYHQLKKILHEAIDDPTKEHDIENIITWSTVFEDAAIFKTELAKISWLDSDTIKALSNIRYRGWGQFSRKLLDGLKLGNGHTVIQELMLSNHNLMQILTDETLKTTMAELNQDKLKADDIEDVINDAYTSPSNKKALRQVLRVVEDIKHAANGQDPSWLYIETADGPGTAGKRTQSRQKQIQTVYANAAQELIDSAVRGELEDKIADKASFTDRLVLYFMQGGRDIYTGAPLNIDQLSHYDIDHILPQSLIKDDSLDNRVLVNATINREKNNVFASTLFASKMAATWRKWHEAGLISGRKLRNLMLRPDEIDKFAHGFVARQLVETRQIIKLTEQIAAAQYPNTKIIAVKAGLSHQLREELDFPKNRDVNHYHHAFDAFLAARIGTYLLKRYPKLAPFFTYGEFAKVDVKKFREFNFIGALTHAKKNIVAKDTGEIVWDKERDIQELDRIYNFKRMLITHEVYFETADLFKQTIYAAKDSKERGGSKQLIPKKQGYPTQVYGGYTRENTAYLAVVKTVEKKADVYRVVRIATSQVAALKEARAQSTVKERELLKKFLTTKFTKIGKNGKKAITPFDIVIPRVPREQLFHNKRYGFFMVNSDTLMHNYQELWMSRSDQQILSKLVKSAKTVENGQVGRLFENIVEQINKYFPLYDINQFRKKLDQSKDIFSKLPLEGNGTTSGKRETIQNILTGAGTGAKNGDLKNLGIKTPFGFLQVPSGIVLDDDTTLIYQSPTGMLNRIVRLSEL

SEQ ID NO: 297 - protein, 1361 aa, Lactobacillus rhamnosus
  Lactobacillus rhamnosus R0011
MTKLNQPYGIGLDIGSNSIGFAVVDANSHLLRLKGETAIGARLFREGQSAAERRESRTTRRRLSRTRWRLSFLRDFFAPHITKIDPDFFLRQKYSEISPKDKDRFKYEKRLFNDRTDAEFYEDYPSMYHLRLHLMTHTHKADPREIFLAIHHILKSRGHFLTPGAAKDFNTDKVDLEDIFPALTEAYAQVYPDLELTFDLAKADDFKAKLLDEQATPSDTQKALVNLLLSSDGEKEIVKKRKQVLTEFAKAITGLKTKFNLALGTEVDEADASNWQFSMGQLDDKWSNIETSMTDQGTEIFEQIQELYRARLLNGIVPAGMSLSQAKVADYGQHKEDLELFKTYLKKLNDHELAKTIRGLYDRYINGDDAKPFLREDFVKALTKEVTAHPNEVSEQLLNRMGQANFMLKQRTKANGAIPVQLQQRELDQIIANQSKYYDWLAKPNPVEKHRASKPYQLDELLTFRIPYYVGPLITPKEQAESRENVFAWMIRKDPSGNITPYNFDEKVDCPASANMFIQRMKNTDTYLIGEDVLPKRSLLYQKYEVLNELNNVSIDGRRLGADQKQRLIREVFERHSSVTIKQVAENLVAHGDFAKRPEIRGLADEKRFLSSLSTYHQLKKILHEAIDDPTKEHDIENIITWSTVFEDAAIFKTELAKISWLDSDTIKALSNIRYRGWGQFSRKLLDGLKLGNGHTVIQELMLSNHNLMQILTDETLKTTMAELNQDKLKADDIEDVINDAYTSPSNKKALRQVLRVVEDIKHAANGQDPSWLYIETADGPGTAGKRTQSRQKQIQTVYANAAQELIDSAVRGELEDKIADKASFTDRLVLYFMQGGRDIYTGAPLNIDQLSHYDIDHILPQSLIKDDSLDNRVLVNATINREKNNVFASTLFASKMAATWRKWHEAGLISGRKLRNLMLRPDEIDKFAHGFVARQLVETRQIIKLTEQIAAAQYPNTKIIAVKAGLSHQLREELDFPKNRDVNHYHHAFDAFLAARIGTYLLKRYPKLAPFFTYGEFAKVDVKKFREFNFIGALTHAKKNIVAKDTGEIVWDKERDIQELDRIYNFKRMLITHEVYFETADLFKQTIYAAKDSKERGGSKQLIPKKQGYPTQVYGGYTRENTAYLAVVKTVEKKADVYRVVRIATSQVAALKEARAQSTVKERELLKKFLTTKFTKIGKNGKKAITPFDIVIPRVPREQLFHNKRYGFFMVNSDTLMHNYQELWMSRSDQQILSKLVKSAKTVENGQVGRLFENIVEQINKYFPLYDINQFRKKLDQSKDIFSKLPLEGNGTTSGKRETIQNILTGAGTGAKNGDLKNLGIKTPFGFLQVPSGIVLDDDTTLIYQSPTGMLNRIVRLSEL

SEQ ID NO: 298 - protein, 1375 aa, Lactobacillus ruminis
  Lactobacillus ruminis ATCC 25644
MRKNQEPYNIGLDIGTSSIGWSIMNDNFDLMRVKGKKGIGVRLYNEGQSAAERRMHRTARRRYGRRKWRLRLLEDFFDEHMAEVDDTFFARLKDSNISPKDDKKYRKSLLFPKSKGVTYQDDGEFYKKYPTMYHLRYALMTEHRKFDLREIYLAFHHMVKYRGNFLYDTSVDSFEAKNLDIKGKFDEINDLLSSYTDFYVDNSNAALVESILLEKNTTRKDKSKKIAKLLHVEDKEKGKNKKAKDLATQISNAVLGLKCNFHLIFELQQKYSFDLCSEKTEENIAKLSEVLDENQKMLLMILKEVQDQVMLNAFVPSGMSLSEAMMQKYDDYGEQLKIYHELEHSVSDDSAAKLRGAYRDYNDNIIKRIDGDNKKDTFYKRVKNILTKISKEYVDQDVLESCGKLKKLIDENKLFIRQRTAANGVLPHQLHQIEMRKIIDNQKEYYPWLAEPNPNEKRRVYSKYKVEELIAFRIPYYVGPLVDPNNADKNKEARFSWMVRKKDGEITPWNFYDKVDWAESANNFIERMKSKDTYLLGEDVVPKESMLYQKYEVLNELNNLRINDSGLSDSFEDVKLKQAIYNDLFKKQKIVKITDLQNYLVQNHKYLVKPKISGLADENRFLSSLSTYSDLKTIFGDKVDDRTYFNDFEKMVEYSTVFEDGHDYNQKLDEYTWLTKEEKYKIGKKRYRGWGKLSKKLLTGLRDKNNHTIMDNLWETNRNFMQIQTADEFSKQIAEENERHLKGSVSDAINDMYTSPANKKAIRQVLRVVDDIQKAMGYAPSSISLEFAREDGPSVRTVSRANRMKSIYEKYASEVSEEVMKDLDGVIKDKKGLNDRLYLYFEQQGKDMYSGHPLDFDKVISGQEYDIDHILPQAVIKDDSLDNRVLTTKALNNDVKSKGVPCRMFNGMHSFWKNLYDKGFISRRKFNNLTTNPENIDKYKMKGFVNRQLVETRQIIKLVANVLNDKYQNDDVDIIEVRAELTHDVRKHFKFYKNRNVNDYHHAFDAYLTSFIGHYLFKKYPNLRPLFDYNDFMKVSDNVFKQLRGNNFLGEFLNKTGDIISTDGNFVLNKEEMINKLNKAYAFKKILVTKEVGQRTGAMFNETRYPAPNSRKAALKYRRMPKPDSLISVKDYKNTDIYGGYSGKNDAYMVIVDMGKQYMVVGVPVRYTEKLDKLRIKHSELYRDELRKVLSRDKTLLDSKGNVKRFDIVLDRVLYGQLIEDGNELFTLGSSKYKRNFRQLFLDKQCIEILDSSATPQPTDEELIWVYDQILDKVDKYFELYDINRQRETLRKGRAAFCSLPNISMKKDDVTKKKILNEILVALHANESESNCEKIGKKVFGRLQVPGGIKLSKEAKLIYQSPTGLFERVVYLKDL

SEQ ID NO: 299 - protein, 1339 aa, Lactobacillus salivarius
  Lactobacillus salivarius SMXD51
MERYHIGLDIGTSSIGWAVIGDDFKIKKKKGKNLIGTRLFNEGATAAERRGFRTQRRRLNRRKWRLKLLEEIFDPYMAEVDEYFFARLKSSNLSPKDSNKKYLGSLLFPDKSDSNFYDKYPTIYHLRRDLMEKDEKFDLREIYLAIHHIVKYRGNFLEKVPAKNYKNSGASIGFLLEEVNSLYKDIIGDESIAILNSEKFEDVEKIILDEETRNLDKQKSVGKLLVEDKKKKNIVTAFSKAIFGYKFNIEDLLLIENDEKNKLTFNDENIDDIFNELSHSLDDKQMDLLTKTREIYFKFKLNMIVPTGYTLSESMIEKYEMHKAHLKMYKEFINTLNTKDRKILKNAYSDYINTEKAKAANAQENFYKTVKKIIKDNNSDTAKKIIVLIDEGNFMPKQRTGENGVIPHQLHQIELDRIIENQAKYYPWLAEANPVEKNRKFAKYKLDELVTFRVPYYVGPLIDKTESNKNEKETKFAWMVRKAKGTITPWNFENLVDRTESANRFIKRMTSKDTYIIGEDVLPASSLLYEKFKVLNELNNIKVNEKKLDIEQKQDIYLNLFTTAKNVTKKSLATYLNCSADSISGLSDGEKFNSSLSSYIDLKAILGNIVDDCNKNEDLEKIIEYSTVFEDGNIYKEKLSEISWLTDEQIEKLSNIHFKGWGRLSKKLLTQITNENGERIIDALWNTSNNFMQIINDESIQAKLAEINGKYAGKSDLEDILSEAYTSPQNKKAIRQVMKVVEDIEKAMQCEPTSISIEFTRKKQKSRLTNTRYKKISDVYEKIADEVISEYELRKLQSELDSNANNMRDRYYLYFMQLGRDMYTGEKINIDELHQRYDIDHILPQSFIKDDSINNRVLTRKDVNNKEKSDKTAADLYAVEMSDFWRKLRKQGLITEQKYKNLLTKSDSIDKYAKKGFIKRQLVETSQVVKLVANILQDKYSDTKIIEVRAKLNSNLREEYKLIKNRAVNDYHHAIDGYLTTFIGQYLYKTYPKLRSYFVYNDFKKLDSNYLKHMKKFNFLWQLQDDKTIDIYDNVNNKFVLNVPEMKKYIQKIYNYKYMLVSKEVTTKNGAFYDQTKYNAKTVNLIPIKKNKPTNIYGGYKGKVSSYMMLVKIRKKKEVIYKFVGVPRLWTDELDRLKDTTERKILLNEIAKNSLSKTEQDFEVILDKVYYGQLIIDGNQKYTLGSSEYKYNAMQLHLSKHALEVLAKENVKDAEITDKDLVSVYEEILSVVNKYFELYDINKFRQKLNEGLEIFRKLPVYNVYESNKIKQVGKFEVLNRILMGLHANAMITDLKVLGIKTKLGQMQVNGGIKLSPDAKLIYQSPTGIFSRAVRVKDLG

SEQ ID NO: 300 - protein, 1331 aa, Lactobacillus sanfranciscensis
MNKQPYNIGLDIGTSSVGWSATELDNRLLHIKGHNGIGVRLFKEGESAADRRGFRTTRRRLARRKWRLRLLNEIFATEIAKVDPSFFARLKQSNVSPKDPNKTMFENILFDDENLDDQKFHHDYKTIYHLRQAIINHPEQKFDIRLIYLAMHHIIKYRGHFLNQANVQDFKGGKIDLEKSFKALNDIFENQGRDLRLVTDKANQYVKVLSDNAKTRSDRKKELSKLLYVPIDKDTDKNSKKVTGEILKAILGNKAKFDVIFGIEVENPKEWVLTFNSDDFDDKIEGLSSQMTDEDSEILLILKELYFALNLSDILNNSVTDKNAKTLSEAMINRYDDHKNQLAMLKKVIDSSDKKHAKELKEAYSAYIDGENNKKISFEDLKKRIQKNLVDSELSQKINDLLDHDYFLPKQRSKENGAIPHQLQQQELDQIIESQKQYYPFLAELNPNEKRSRQAKYKLDELVAFRVPYYVGPMVEVTDSNQENNGKFAWMIRKEQGEITPWNFDEKVDRTETATKFITRMTTTDTYLIGEPVLPKNSLLYQKFVVLNELNNLKINQEIITPGQKQYLYEHVMKKNKRVTLKKIADALVIKGDYPYAPEVKGTTDQKNLNNGLTTYIDLAKIFGNELDDVDREADFEKIIEWSTIFEDQHIFALKLQELKWLTEKQRNQVVKLRYQGWGKLSKELLAGLVDDNGQRIIDLLWSDNQNFMQIVNQKSFKESIADHNGAHLEEKNLKDVINDLYTSPQNKKAIRQVILVVDDIINAVGYEPANIMMEFAREDSNDHRLTNSRSRQLENVYKDITNSWFDNDSVKDELEDKIKNKDKFTDRLYLYFTQGGKDLYTGEPLNIDDLSSYDIDHILPQSFILDNSLDNRVLTSQRNNRVSKEDQLPGELFGTKMHAFWKRLKAAHLISNKKYYNLTLTPNSISKFNNQGRFINRQLVETRQVIKLAAEILHNRYSEEKGTNIVTIKANLTHHMREKFNFYKNRNVNDYHHAFDAYLTAFVGNWLLQQYPKLKPYFVYGDFAKTEINNLKSFNMLYKFEQAHQLNEKDGKIAKDADALLGYMKNVYHFKKMLVTKKLETNHGALFKQTLYPSPAHDIKKRQLIKPKDNRPTDIYGGYTHEERKYMSLVKVIGKKDNEYRMANVPLLKINKNNDIKEILKSQFSNKKFEIVLPKVLKNQLFSENGALFVIGSKGYKYNANQLVLSDLDMKLLNDLSNNKSIDEVTINQLFKNIVDSTNKYMPLYEIKNLNEVVEKFNNLEFNDKKKTITDFLLATHANPTMSNLKNIGLPSYFGRFTSGNAGIKLSENANVIYQSPTGLFSRKVKISDF

SEQ ID NO: 301 - protein, 1419 aa, Lactobacillus sp.
  Lactobacillus sp. 66c
MAKPQNYTIGLDIGTNSVGWTVTDDQNNILRIKSKKAIGARLFEEGKVAAERRSFRTTRRRLSRRKWRIKLLEELFDEEISKVDPNFFARSHESWISPKDKRERYSAIVFPTPEEDKKFHNEYPTIYHLRDRLMKDDQKHDIREIYVAIHHIMKYRGNFLHDESIETYRSGMSSLGGGDERTILNTKILDDLNDAFADNLATQGISVNSASADQINEIVTSGHLNVDSQKAIAKLLLPTTLSSDDKKQDKKIKKLATDAAKNVASAWLGYKANFAAILNIQEVDKDKKKIYSFALQGADEEDKVETLESVLSQDQIEIVDRIIRIRHAIVLGEIIPVGMTLSEAMIEKYDQHAKDLKNLKTVIRNLKDRKNAVKLQAIYDLYVNNRHADTAKAMKLAGVKKRTELLEPEEFNKSIEKLLDDSPVSAEIKKRIAEKDFLPLQRSNSNGVIPNQLHQIELDEIIKKQSKYYPFLGETNEHASADVARKAPTKLDQLLTFRVPYYVGPLITKEEQEEQDGHSFAWMIRKNPKDHEKITPWNFDEKVDRMASATQFIKRMTTKDTYLLGEDVLPSSSLKYQLFTVLNELNNLRINHKKLTREEKEQVIEDLFKKYKTVKADKFKNYWQKGHAGLDVKIQGMADPEKFNSTMSTYIDLQKIFGDQLDDAQRQNDFEKIIEYSTIFEDRKILGEKLRADFVWLSEDQIKRLCRLRLQGWGRLSLKLLTRLTDADGQNVLERLLNSNDNFMQIVKDPVIKAKIEQKNQKLLRADWSENATESILDEAYTSPQNKKAIRQVMRVVHDIVKACDGNLPAKFAIEFARSQDDDPKRTVARADRLQKIYAQISDEVVSQGVKDQLSGMKSLKDRYYLYFMQGGRDAYTGKPLNIDRLSDYDIDHIMPQSFIKDDSLDNRVLVTRAVNNQKSDNVPVLLYGNHLVADLGITIREMWDRWQKSGMISKRKLANLLTDPATLSEYRAEGFINRQLVETSQVIKLTATILQSEFPDSKIIEVPAKYNSILRKQFDLYKSREVNDYHHAIDAYLSTIVGNYLYQVYPNLRRLFVYGEFKKFSHGEEESSHQAVRRVKSMNFLDDLLRGKHGDDIYCRVTGEVIFSRKDIISKLKQAYSFKQMLVTQEVFTKKSALFDQTVYPSPARDSKTRSGLIPRKQGMDTEIYGGYSGNKDAYFVLAQVVKSKGHTLQVVGVPIRALRALANCSNYSEQLLKIVKAQVLFNKKTGKAKKGISDVRILLDKIPYRQPVLDGSAFYMLGSSTYKYNLKQISLSQQSMKYILDYIDDPNFNKHEMTKIDQQNEKECLLSVYDEILDKMDKYLSLYDINGFRKKLHVGRDKFIKLEVEKQAEAIKNVLRGFHANSDMTKLSDLGLSTSLGFMQASDGIKLSDNAVFIYQSPTGLFERRVKVSDLLK

SEQ ID NO: 302 - protein, 1289 aa, Lactobacillus versmoldensis
  Lactobacillus versmoldensis KCTC 3814
MRRRYRRRRNRLNWLDELFADELAKIDPSFLLRMKNSWVSKKESTRKRDPYNLFIDEKYNDVDYFNQYPTIFHLRKELITEDKKVDIRLIYLAIHNIIKYRGNFTLENQNFDISQLSSNFSQQISDFFALFSDFGVIMPEDFDPDKISDILLNPNLSPSGKVSEAIATISPKTNVKAKIKIILLLLVGNNGDLKKLFDLETTEKIAVKLSSRHIDSELPIILSELNEQQENIITIANSIFGSIILKDFLGDETSISAAKVISFEDHKQDLQKLKTMWRETSNKEAVKAGKKAYEDYIGHEDSETFYKKIKKFLEKAQPVDLANKALAEIELENYLPKQRNRNNTVIPYQLNENELIAILDHQEKYYPFLKENRDKILSLLTFRIPYYVGPLQDSNNNRFSWMTRKASGAIRPWNFSEKVNVEQSSNDFIKRMRSTDTYLIGEPVLPKKSLIYQCYEVLSELNNTRVKDGSSNPKRLDVTIKQRIYNEIFKNQKSVSVKVLQNWLIKESYFKSPEISGLADKKKYLSSLSTYIDFKKIFGQRFVDDPVNSPQLEELAEWLTLFEDKKILLIKLQNSKYSYDQATINKLSTMRYQGTGKLSKKLLVDLKTTKKSIGKSGAESLSILDLMWSTKDNFMQIIHDADYTFEQQIKEFNYDTEDELTPLEKVANLHGSPALKRGLNQSIKVVADIVKFMGHDPEKIFIEFTRSDDFSKLTISRYRRIKKQYLEIAKAIKKIPAEFKDIKEYQTQLEENKGKLASERLMLYFLQCGHSLYSNKPIDLNMINSSKYHVDHILPQSYIKDDSLENKALVLASENENKIDNMLISHDIIATNLPRWQALKDQNLMGSKKFADLTRTTVTENQKKGFIQRQLVQTSQIVKNITLILNDLYKNTSCIETRATLSSEFRKAFSNFDETTYHYQFPEFVKNRDVNDFHHAQDAFLACVIGEYQLKKYPKDNLRLVYDQYSKFLDSLKKDTRKKNGRMPRYTQNGFIIGSMFNGKTYVDDNGEIIWDQKIKESIRKTFNYHQFNVVRQTIEQHGKLFNDTIQPHSDRYKLIPLKTNRDPAIYGGYNNDNNAYSVVLDVDGKKKINGIPIRIANQLKSDELDLSSWLENNIKHKKPMTILIDKVPKYQRIINEETGDLLITSANEVINNVQLFLPSMYTALISLLDSTKTEMYSKLLSNYEANILIDIYDYLLTKLKNNYPLYRKEWAKLAEHRDDFIESDLVTQASTLQQLIKFMHADPSNVNLKFGNFKGNRFGRKNGNIKLSKTDFIYESPTGLFKSIKHID

SEQ ID NO: 303 - protein, 1372 aa, Legionella pneumophila
  Legionella pneumophila 130b
MESSQILSPIGIDLGGKFTGVCLSHLEAFAELPNHANTKYSVILIDHNNFQLSQAQRRATRHRVRNKKRNQFVKRVALQLFQHILSRDLNAKEETALCHYLNNRGYTYVDTDLDEYIKDETTINLLKELLPSESEHNFIDWFLQKMQSSEFRKILVSKVEEKKDDKELKNAVKNIKNFITGFEKNSVEGHRHRKVYFENIKSDITKDNQLDSIKKKIPSVCLSNLLGHLSNLQWKNLHRYLAKNPKQFDEQTFGNEFLRMLKNFRHLKGSQESLAVRNLIQQLEQSQDYISILEKTPPEITIPPYEARTNTGMEKDQSLLLNPEKLNNLYPNWRNLIPGIIDAHPFLEKDLEHTKLRDRKRIISPSKQDEKRDSYILQRYLDLNKKIDKFKIKKQLSFLGQGKQLPANLIETQKEMETHFNSSLVSVLIQIASAYNKEREDAAQGIWFDNAFSLCELSNINPPRKQKILPLLVGAILSEDFINNKDKWAKFKNFWNTHKIGRTSLKSKCKEIEEARKNSGNAFKIDYEEALNHPEHSNNKALIKIIQTIPDIIQAIQSHLGHNDSQALIYHNPFSLSQLYTILETKRDGFHKNCVAVTCENYWRSQKTEIDPEISYASRLPADSVRPFDGVLARMMQRLAYEIAMAKWEQIKHIPDNSSLLIPIYLEQNRFEFEESFKKIKGGSSDKTLEQAIEKQNIQWEEKFQRIINASMNICPYKGASIGGQGEIDHIYPRSLSKKHFGVIFNSEANLIYCSSQGNREKKEEHYLLEHLSPLYLKHQFGTDNVSDIKNFISQNVANIKKYISFHLLTPEQQKAARHALFLDYDDEAFKTITKFLMSQQKARVNGTQKFLGKQIMEFLSTLADSKQLQLEFSIKQITAEEVHDHRELLSKQEPKLVKSRQQSFPSHAIDATLTMSIGLKEFPQFSQELDNSWFINHLMPDEVHLNPVRSKEKYNKPNISSTPLFKDSLYAERFIPVWVKGETFAIGFSEKDLFEIKPSNKEKLFTLLKTYSTKNPGESLQELQAKSKAKWLYFPINKTLALEFLHHYFHKEIVTPDDTTVCHFINSLRYYTKKESITVKILKEPMPVLSVKFESSKKNVLGSFKHTIALPATKDWERLFNHPNFLALKANPAPNPKEFNEFIRKYFLSDNNPNSDIPNNGHNIKPQKHKAVRKVFSLPVIPGNAGTMMRIRRKDNKGQPLYQLQTIDDTPSMGIQINEDRLVKQEVLMDAYKTRNLSTIDGINNSEGQAYATFDNWLTLPVSTFKPEIIKLEMKPHSKTRRYIRITQSLADFIKTIDEALMIKPSDSIDDPLNMPNEIVCKNKLFGNELKPRDGKMKIVSTGKIVTYEFESDSTPQWIQTLYVTQLKKQP

SEQ ID NO: 304 - protein, 1372 aa, Legionella pneumophila
MESSQILSPIGIDLGGKFTGVCLSHLEAFAELPNHANTKYSVILIDHNNFQLSQAQRRATRHRVRNKKRNQFVKRVALQLFQHILSRDLNAKEETALCHYLNNRGYTYVDTDLDEYIKDETTINLLKELLPSESEHNFIDWFLQKMQSSEFRKILVSKVEEKKDDKELKNAVKNIKNFITGFEKNSVEGHRHRKVYFENIKSDITKDNQLDSIKKKIPSVCLSNLLGHLSNLQWKNLHRYLAKNPKQFDEQTFGNEFLRMLKNFRHLKGSQESLAVRNLIQQLEQSQDYISILEKTPPEITIPPYEARTNTGMEKDQSLLLNPEKLNNLYPNWRNLIPGIIDAHPFLEKDLEHTKLRDRKRIISPSKQDEKRDSYILQRYLDLNKKIDKFKIKKQLSFLGQGKQLPANLIETQKEMETHFNSSLVSVLIQIASAYNKEREDAAQGIWFDNAFSLCELSNINPPRKQKILPLLVGAILSEDFINNKDKWAKFKIFWNTHKIGRTSLKSKCKEIEEARKNSGNAFKIDYEEALNHPEHSNNKALIKIIQTIPDIIQAIQSHLGHNDSQALIYHNPFSLSQLYTILETKRDGFHKNCVAVTCENYWRSQKTEIDPEISYASRLPADSVRPFDGVLARMMQRLAYEIAMAKWEQIKHIPDNSSLLIPIYLEQNRFEFEESFKKIKGSSSDKTLEQAIEKQNIQWEEKFQRIINASMNICPYKGASIGGQGEIDHIYPRSLSKKHFGVIFNSEVNLIYCSSQGNREKKEEHYLLEHLSPLYLKHQFGTDNVSDIKNFISQNVANIKKYISFHLLTPEQQKAARHALFLDYDDEAFKTITKFLMSQQKARVNGTQKFLGKQIMEFLSTLADSKQLQLEFSIKQITAEEVHDHRELLSKQEPKLVKSRQQSFPSHAIDATLTMSIGLKEFPQFSQELDNSWFINHLMPDEVHLNPVRSKEKYNKPNISSTPLFKDSLYAERFIPVWVKGETFAIGFSEKDLFEIKPSNKEKLFTLLKTYSTKNPGESLQELQAKSKAKWLYFPINKTLALEFLHHYFHKEIVTPDDTTVCHFINSLRYYTKKESITVKILKEPMPVLSVKFESSKKNVLGSFKHTIALPATKDWERLFNHPNFLALKANPAPNPKEFNEFIRKYFLSDNNPNSDIPNNGHNIKPQKHKAVRKVFSLPVIPGNAGTMMRIRRKDNKGQPLYQLQTIDDTPSMGIQINEDRLVKQEVLMDAYKTRNLSTIDGINNSEGQAYATFDNWLTLPVSTFKPEIIKLEMKPHSKTRRYIRITQSLADFIKTIDEALMIKPSDSIDDPLNMPNEIVCKNKLFGNELKPRDGKMKIVSTGKIVTYEFESDSTPQWIQTLYVTQLKKQP

SEQ ID NO: 305 - protein, 1355 aa, Leuconostoc gelidum
  Leuconostoc gelidum KCTC 3527
MTYSIGLDIGTGSVGWAVIGDDYRLKRAKGKNLIGVRLFDSATTAAERRGYRTTRRRLSRRHWRLRLLNDIFASDLAEQDENFLPRLKYSWVNPDDEQNPQLNSDVANGALFGSSETDKAFHKNYPTIYHLRHELMTDTAKHDLREVYLAIHHIVKYRGNFLNTADKINAENSFNVDLFIAALDEYNEFLETPITSIKDAQLFSDKLTDINARNKSVRVENAMSETYDDKSKIFKAILTALVGNTANFQTIFDLSDLEKDEAKNFKFKLDLEDVETKLDVVRAKLSDEQNAFLEAVLIAYDGITLKMILGDYKSISQSMIESYKSHQRDWKYIKNNVRLNEQKIEPDKNSVKFFKLDPKKLIYPSNLAYLQVISSNEDEHRKGLDYFKTAIQDADILQRIENDTFLPRQRTKRNGVLPYQLHLAELEQIIKKQSKYYPFLANIYTQDNKTENKLIGLLKFRVPYYVGPLVEAEKVTGDGKNHWLIKKELQENTPITPFNFDDVVDKDKSGEQFIKRITGTDSYLIGEPTLPENSLLYQKYNVLQELNNVRNERHQRLPIKVKQDIFEHVFKIDKNVNAKKVMAYLKLNGYGDFQIAGLSDTRTGKFNSNLSSYNYFVDLLGREKTEKIREDRLEEIIEIQTVFEDKILVAKRLSNLDFLTPQEKSKLSAKHYTGWGRLSQKLLTTQFIKTALSEAGDIIPQSHSIIDLLYYTDKNLMEILNDKTFNVRNWLTEQNKGTESGNSLYDQIDALAGPKDIKRGITQVFSIIDDIKKAMGSNPETVYLEFARETQTSRLTNSRLNRVQEIYNSPELKTEFAYLAKKLEAETKESIHDDRLYLYYLQEGRDMYTGKEIPFDQISSNYDIDHIIPQAFTKDDSLDNRVLVNRATNARKSNSPTFTNDIIDNRKSWWQSLVKRGLMSKEKFERLTDKRKTFSENQTNHFIARQLVETRQIIKNVADLIKNNYDGTQAVAIRASLTGEMRRYLDWPKNRDMNDYHHAHDALMMATVGKYVDRRGFFDNGSVSDGAGNAYNLYTKDWLVAARVGTRNDSQRVNPYGFIVGSMNSKAVRQQVNKETGEIVWGNENLDYLRHVLSYKKILVTRRLSGSSGRLYAETLFSPNPKAKLIAQKANRSVALYGGFTKAESAYTALVEFNKKGDRSYKLIKVPMAIANRVNDKQITVTAYIASLNLRDFSRVVLEHLPLGTLIRESDGSEFYAASSEYKHNAKELWAPKEILRSSKKLDKATADNLIDIFDFLTNDKTISNFKFYEKDLLHLKNVRDKFVEASDEIKIKVLSDVIYELHNDAGWRDPFKHIQEKPAWTMLQVKGGIKLSEKAAIVYQSPTGLFETITIVGE

SEQ ID NO: 306 - protein, 1337 aa, Listeria innocua
  Listeria innocua ATCC 33091
MKNMKKPYTIGLDIGTNSVGWAVLTDQYDLVKRKMKIAGDSEKKQIKKNFWGVRLFDEGQTAADRRMARTARRRIERRRNRISYLQGIFAEEMSKTDANFFCRLSDSFYVDNEKRNSRHPFFATIEEEVEYHKNYPTIYHLREELVNSSEKADLRLVYLALAHIIKYRGNFLIEGALDTQNTSVDGIYKQFIQTYNQVFASGIEDGSLKKLEDNKDVAKILVEKVTRKEKLERILKLYPGEKSAGMFAQFISLIVGSKGNFQKPFDLIEKSDIECAKDSYEEDLESLLALIGDEYAELFVAAKNAYSAVVLSSIITVAETETNAKLSASMIERFDTHEEDLGELKAFIKLHLPKHYEEIFSNTEKHGYAGYIDGKTKQADFYKYMKMTLENIEGADYFIAKIEKENFLRKQRTFDNGAIPHQLHLEELEAILHQQAKYYPFLKENYDKIKSLVTFRIPYFVGPLANGQSEFAWLTRKADGEIRPWNIEEKVDFGKSAVDFIEKMTNKDTYLPKENVLPKHSLCYQKYLVYNELTKVRYINDQGKTSYFSGQEKEQIFNDLFKQKRKVKKKDLELFLRNMSHVESPTIEGLEDSFNSSYSTYHDLLKVGIKQEILDNPVNTEMLENIVKILTVFEDKRMIKEQLQQFSDVLDGVVLKKLERRHYTGWGRLSAKLLMGIRDKQSHLTILDYLMNDDGLNRNLMQLINDSNLSFKSIIEKEQVTTADKDIQSIVADLAGSPAIKKGILQSLKIVDELVSVMGYPPQTIVVEMARENQTTGKGKNNSRPRYKSLEKAIKEFGSQILKEHPTDNQELRNNRLYLYYLQNGKDMYTGQDLDIHNLSNYDIDHIVPQSFITDNSIDNLVLTSSAGNREKGDDVPPLEIVRKRKVFWEKLYQGNLMSKRKFDYLTKAERGGLTEADKARFIHRQLVETRQITKNVANILHQRFNYEKDDHGNTMKQVRIVTLKSALVSQFRKQFQLYKVRDVNDYHHAHDAYLNGVVANTLLKVYPQLEPEFVYGDYHQFDWFKANKATAKKQFYTNIMLFFAQKDRIIDENGEILWDKKYLDTVKKVMSYRQMNIVKKTEIQKGEFSKATIKPKGNSSKLISRKTNWDPMKYGGLDSPNMAYAVVIEYAKGKNKLVFEKKIIRVTIMERKAFEKDEKAFLEEQGYRQPKVLAKLPKYTLYECEEGRRRMLASANEAQKGNQQVLPNHLVTLLHHVANCEVSDGKSLDYIESNREMFAELLAHVSEFAKRYTLAEANLNKINQLFEQNKEGDIKAIAQSFVDLMAFNAMGAPASFKFFETTIERKRYNNLKELLNSTIIYQSITGLYESRKRLDD

SEQ ID NO: 307 - protein, 1334 aa, Listeria innocua
MKKPYTIGLDIGTNSVGWAVLTDQYDLVKRKMKIAGDSEKKQIKKNFWGVRLFDEGQTAADRRMARTARRRIERRRNRISYLQGIFAEEMSKTDANFFCRLSDSFYVDNEKRNSRHPFFATIEEEVEYHKNYPTIYHLREELVNSSEKADLRLVYLALAHIIKYRGNFLIEGALDTQNTSVDGIYKQFIQTYNQVFASGIEDGSLKKLEDNKDVAKILVEKVTRKEKLERILKLYPGEKSAGMFAQFISLIVGSKGNFQKPFDLIEKSDIECAKDSYEEDLESLLALIGDEYAELFVAAKNAYSAVVLSSIITVAETETNAKLSASMIERFDTHEEDLGELKAFIKLHLPKHYEEIFSNTEKHGYAGYIDGKTKQADFYKYMKMTLENIEGADYFIAKIEKENFLRKQRTFDNGAIPHQLHLEELEAILHQQAKYYPFLKENYDKIKSLVTFRIPYFVGPLANGQSEFAWLTRKADGEIRPWNIEEKVDFGKSAVDFIEKMTNKDTYLPKENVLPKHSLCYQKYLVYNELTKVRYINDQGKTSYFSGQEKEQIFNDLFKQKRKVKKKDLELFLRNMSHVESPTIEGLEDSFNSSYSTYHDLLKVGIKQEILDNPVNTEMLENIVKILTVFEDKRMIKEQLQQFSDVLDGVVLKKLERRHYTGWGRLSAKLLMGIRDKQSHLTILDYLMNDDGLNRNLMQLINDSNLSFKSIIEKEQVTTADKDIQSIVADLAGSPAIKKGILQSLKIVDELVSVMGYPPQTIVVEMARENQTTGKGKNNSRPRYKSLEKAIKEFGSQILKEHPTDNQELRNNRLYLYYLQNGKDMYTGQDLDIHNLSNYDIDHIVPQSFITDNSIDNLVLTSSAGNREKGDDVPPLEIVRKRKVFWEKLYQGNLMSKRKFDYLTKAERGGLTEADKARFIHRQLVETRQITKNVANILHQRFNYEKDDHGNTMKQVRIVTLKSALVSQFRKQFQLYKVRDVNDYHHAHDAYLNGVVANTLLKVYPQLEPEFVYGDYHQFDWFKANKATAKKQFYTNIMLFFAQKDRIIDENGEILWDKKYLDTVKKVMSYRQMNIVKKTEIQKGEFSKATIKPKGNSSKLIPRKTNWDPMKYGGLDSPNMAYAVVIEYAKGKNKLVFEKKIIRVTIMERKAFEKDEKAFLEEQGYRQPKVLAKLPKYTLYECEEGRRRMLASANEAQKGNQQVLPNHLVTLLHHAANCEVSDGKSLDYIESNREMFAELLAHVSEFAKRYTLAEANLNKINQLFEQNKEGDIKAIAQSFVDLMAFNAMGAPASFKFFETTIERKRYNNLKELLNSTIIYQSITGLYESRKRLDD

SEQ ID NO: 308 - protein, 1334 aa, Listeria monocytogenes
MKNPYTIGLDIGTNSVGWAVLTNQYDLVKRKMKVAGNSDKKQIKKNFWGVRLFDDGQTAVDRRMNRTARRRIERRRNRISYLQEIFAVEMANIDANFFCRLNDSFYVDSEKRNSRHPFFATIEEEVAYHKNYRTIYHLREELVNSSEKADLRLVYLALAHIIKYRGNFLIEGALDTKNTSVDGVYEQFIQTYNQVFMSNIEEGTLAKVEENIEVANILAGKFTRREKFERILQLYPGEKSTGMFAQFISLIVGSKGNFQKVFDLIEKTDIECAKDSYEEDLEALLAIIGDEYAELFVAAKNTYNAVVLSSIITVTATETNAKLSASMIERFDAHEKDLGELKAFIKLHLPKQYQEIFNNAAIDGYAGYIDGKTKQVDFYKYLKTILENIEGADYFIAKIEEENFLRKQRTFDNGAIPHQLHLEELEAIIHQQAKYYPFLREDYEKIKSLVTFRIPYFVGPLAKGQSEFAWLTRKADGEIRPWNIEEKVDFGKSAVDFIEKMTNKDTYLPKENVLPKHSLCYQKYMVYNELTKVRYIDDQGKTNYFSGQEKQQIFNDLFKQKRKVKKKDLELFLRNINHIESPTIEGLEDSFNASYATYHDLLKVGMKQEILDNPLNTEMLEDIVKILTVFEDKPMIKEQLQQFSDVLDGGVLKKLERRHYTGWGRLSAKLLVGIREKQSHLTILDYLMNDDGLNRNLMQLINDSNLSFKSIIEKEQVSTTDKDLQSIVADLAGSPAIKKGILQSLKIVDELVSIMGYPPQTIVVEMARENQTTGKGKNNSKPRYKSLEKAIKEFGSKILKEHPTDNQELKNNRLYLYYLQNGKDMYTGQELDIHNLSNYDIDHIVPQSFITDNSIDNLVLTSSAGNREKGGDVPPLEIVRKRKVFWEKLYQGNLMSKRKFDYLTKAERGGLTDADKARFIHRQLVETRQITKNVANILHQRFNNETDNHGNTMEQVRIVTLKSALVSQFRKQFQLYKVREVNDYHHAHDAYLNGVVANTLLKVYPQLEPEFVYGEYHQFDWFKANKATAKKQFYTNIMLFFGQKERIIDENGEILWDKKYLETIKKVLDYRQMNIVKKTEIQKGEFSKATIKPKGNSSKLIPRKENWDPMKYGGLDSPNMAYAVIIEHAKGKKKLIFEKKIIRITIMERKMFEKDEEAFLEEKGYRHPKVLTKLPKYTLYECEKGRRRMLASANEAQKGNQLVLSNHLVSLLYHAKNCEASDGKSLKYIEAHRETFSELLAQVSEFATRYTLADANLSKINNLFEQNKEGDIQAIAQSFVDLMAFNAMGAPASFKFFEATIDRKRYTNLKELLSSTIIYQSITGLYESRKRLDD

SEQ ID NO: 309 - protein, 1334 aa, Listeria monocytogenes
  Listeria monocytogenes FSL J1-194
MKNPYTIGLDIGTNSVGWAVLTDQYDLVKRKMKVAGNSDKKQIKKNFWGVRLFDDGQTAVDRRMNRTARRRIERRRNRISYLQEIFAVEMANIDANFFCRLNDSFYVDSEKRNSRHPFFATIEEEVAYHKNYRTIYHLREELVNSSEKADLRLVYLALAHIIKYRGNFLIEGALDTKNTSVDEVYKQFIQTYNQVFMSNIEEGALAKVEENTEVASILAGKFTRREKFERILRLYPGEKSTGMFAQFISLIVGNKGNFQKVFNLVEKTDIECAKDSYEEDLEALLAIIGDEYAELFVAAKNTYNAVVLSSIITVTATETNAKLSASMIERFDAHEKELGELKAFIKLHLPKQYQEIFNNAEIDGYAGYIDGKTKQVDFYKYLKTTLENVEGADYFITKIEEENFLRKQRTFDNGVIPHQLHLEELEAILHQQAKYYPFLREGYDKIKSLVTFRIPYFVGPLANGQSEFAWLTRKDDGEIRPWNIEEKVDFGKSAVDFIEKMTNKDTYLPKENVLPKHSLCYQKYMVYNELTKIRYIDDQGKTNYFSGREKQQIFNDLFKQKRKVKKKDLELFLRNINHIESPTIEGLEDSFNASYATYHDLLKVGLKQEILDNPLNTEILEDIVKILTVFEDKRMIKEQLEQFSDVLDGVVLKKLERRHYTGWGRLSAKLLVGIRDKQSHLTILDYLMNDDGLNRNLMQLINDSNLSFKSIIEKEQVSTTDKDLQSIVADLAGSPAIKKGILQSLKIVDELVSIMGYPPQTIVVEMARENQTTGKGKNNSKPRYKSLEKAIKDFGSQILKEHPTDNQELKNNRLYLYYLQNGKDIYTGQELDIHNLSNYDIDHIVPQSFITDNSIDNLVLTSSAGNREKGGDVPPLEIVRKRKVFWEKLYQGNLMSKRKFDYLTKAERGGLTEADKARFIHRQLVETRQITKNVANILHQRFNKETDNHGNTMEQVRIVTLKSALVSQFRKQFQLYKVREVNDYHHAHDAYLNGVVANTLLKVYPQLEPEFVYGEYHQFDWFKANKATAKKQFYTNIMLFFAQKERIIDENGEILWDKKYLETIKKVLDYRQINIVKKTEIQKGEFSKATIKPKGNSSKLIPRKENWDPMKYGGLDSPNMAYAVIIEHAKGKKKIVIEKKLIQINIMERKMFEKDEEAFLEEKGYHQPKVLTKLPKYTLYECEKGRRRMLSSANEAQKGNQLVLSNHLVSLLYHAKNCEASDGKSLKYIEAHRETFSELLAQVSEFATKYTLADANLSKINNLFEQNKEGDIKAIAQSFVDLMAFNAMGAPASFKFFEATIDRKRYTNLKELLSSTIIYQSITGLYESRKRLDD

SEQ ID NO: 310 - protein, 1334 aa, Listeria monocytogenes
  Listeria monocytogenes FSL J1-208
MKNPYTIGLDIGTNSVGWAVLTDQYDLVKRKMKVAGNSDKKQIKKNFWGVRLFDEGETAADRRMNRTARRRIERRRNRISYLQEIFALEMANIDANFFCRLNDSFYVDSEKRNSRHPFFATIEEEVAYHKNYRTIYHLREELVNSSEKADLRLVYLALAHIIKYRGNFLIEGALDTKNTSVDGVYKQFIQTYNQVFISNIEEGTLAKMEENTTVADILAGKFTRKEKLERILQLYPGEKSTGMFAQFISLIVGSKGNFQKVFDLVEKTDIECAKDSYEEDLEALLAIIGDEYAELFVAAKNTYNAVVLSSIITVTDTETNAKLSASMIERFDAHEKDLSELKAFIKLHLPKQYEEIFSNVAIDGYAGYIDGKTKQVDFYKYLKTLLENIEGADYFIAKIEEENFLRKQRTFDNGAIPHQLHLEELEAILHQQAKYYPFLKEAYDKIKSLVTFRIPYFVGPLANGQSDFAWLTRKADGEIRPWNIEEKVDFGKSAVDFIEKMTNKDTYLPKENVLPKHSLYYQKYMVYNELTKVRYIDDQGKTNYFSGQEKQQIFNDYFKQKRKVSKKDLEQFLRNMSHIESPTIEGLEDSFNSSYATYHDLLKVGIKQEVLENPLNTEMLEDIVKILTVFEDKRMIKEQLQQFSDVLDGAVLKKLERRHYTGWGRLSAKLLVGIRDKQSHLTILDYLMNDDGLNRNLMQLINDSNLSFKSIIEKEQVSTTDKDLQSIVADLAGSPAIKKGILQSLKIVDELVSIMGYPPQTIVVEMARENQTTVKGKNNSRPRYKSLEKAIKEFGSQILKEHPTDNQELRNNRLYLYYLQNGKDMYTGQELDIHNLSNYDIDHIVPQSFITDNSIDNLVLTSSAGNREKGDDVPPLEIVRKRKVFWEKLFQGNLMSKRKFDYLTKAERGGLTEADKATFIHRQLVETRQITKNVANILHQRFNNETDNHGNNMEQVRIVMLKSALVSQFRKQFQLYKVREVNDYHHAHDAYLNGVVANTLLKVYPQLEPEFVYGEYHQFDWFKANKATAKKQFYTNIMLFFAQKERIIDENGEILWDKKYLETIKKVLDYRQMNIVKKTEIQKGEFSKATIKPKGNSSKLIPRKENWDPMKYGGLDSPNMAYAVIIEHAKGKKKVVFEKKIIRITIMERKAFEKDEKSFLEKQGYRQPKVLTKLPKYTLYECENGRRRMLASANEAQKGNQQVLKGQLITLLHHAKNCEASDGKSLDYIESNREMFGELLAHVSEFAKRYTLADANLSKINQLFEQNKDNDIKVIAQSFVNLMAFNAMGAPASFKFFEATIERKRYTNLKELLSATIIYQSITGLYEARKRLDG

SEQ ID NO: 311 - protein, 1334 aa, Listeria monocytogenes
  Listeria monocytogenes FSL N3-165
MKKPYTIGLDIGTNSVGWAVLTDQYDLVKRKMKISGDSEKKQIKKNFWGVRLFEKGETAAKRRMSRTARRRIERRRNRISYLQEIFAIQMNEVDDNFFNRLKESFYAESDKKYNRHPFFGTVEEEVAYYKDFPTIYHLRKELIDSQKKADLRLVYLALAHIIKYRGHFLIEGALDTKNTSIDEMFKQFLQIYNQVFANDIEEASLKKTEKNQEVAQILAEKFTRKDKLDKILSLYPGEKTTGVFAQFVNIIVGSTGKFKKHFNLHEKKDINCAEDTYDTDLESLLAIIGDEFAEVFVAAKNAYNAVVLSNIITVTDSTTRAKLSASLIERFENHKEDLKKMKRFVRTYLPEKYDEIFDDTEKHGYAGYISGKTKQADFYKYMKATLEKIEGADYFIAKIEEENFLRKQRTFDNGVIPHQLHLEELEAILHQQAKYYPFLREDYEKIKSLVTFRIPYFVGPLAKGQSEFAWLTRKADGEIRPWNIEEKVDFGKSAVDFIEKMTNKDTYLPKENVLPKHSLCYQKYMVYNELTKVRYIDDQGKTNYFSGQEKQQIFNDLFKQKRKVKKKDLELFLRNINQIESPTIEGLEDSFNASYATYHDLLKVGMKQEILDNPLNTEMLEDIVKILTVFEDKRMIKEQLQQFSDVLDGTVLKKLERRHYTGWGRLSAKLLVGIRDKQSHLTILDYLMNDDGLNRNLMQLINDSNLSFKSIIEKEQVSTTDKDLQSIVAELAGSPAIKKGILQSLKIVDELVSVMGYPPQTIVVEMARENQTTNKGKNNSKPRYKSLEKAIKEFGSQILKEHPTDNQELKNNRLYLYYLQNGKDMYTGQELDIHNLSNYDIDHIVPQSFITDNSVDNLVLTSSAGNREKGDNVPPLEIVQKRKIFWEKLYQGNLMSKRKFDYLTKAERGGLTEADKARFIHRQLVETRQITKNVANILHQRFNYKTDGNKDTMETVRIVTLKSALVSQFRKQFQFYKVREVNDYHHAHDAYLNGVVANTLLKVYPQLEPEFVYGEYHQFGWFKANKATAKKQFYTNIMLFFAQKDRIIDENGEILWDKRYLETVKKVLGYRQMNIVKKTEIQKGEFSNVTPNPKGKSNKLIPRKKDWDPIKYGGFDGSKMAYAIIIEYEKQKRKVRIEKKLIQINIMEREAFEKDEKTFLEEKGYHQPKVLIKVPKYTLYECKNGRRRMLGSANEAHKGNQMLLPNHLMALLYHAEKYEAIDGESLAYIEVHRALFDELLAYISEFARKYTLSNDRLDEINMLYERNKDGDVKSIAESFVSLKKFNAFGVHQDFSFFGTKIERKRDRKLNELLNSTIIYQSITGLYESRKRLDN

SEQ ID NO: 312 - protein, 1334 aa, Listeria monocytogenes
  Listeria monocytogenes FSL R2-503
MKNPYTIGLDIGTNSVGWAVLTDQYDLVKRKMKVAGNSDKKQIKKNFWGVRLFDDGQTAVDRRMNRTARRRIERRRNRISYLQEIFAVEMANIDANFFCRLNDSFYVDSEKRNSRHPFFATIEEEVAYHKNYRTIYHLREELVNSSEKADLRLVYLALAHIIKYRGNFLIEGALDTKNTSVDEVYKQFIQTYNQVFMSNIEEGALAKVEENTEVASILAGKFTRREKFERILRLYPGEKSTGMFAQFISLIVGNKGNFQKVFNLVEKTDIECAKDSYEEDLEALLAIIGDEYAELFVAAKNTYNAVVLSSIITVTATETNAKLSASMIERFDAHEKELGELKAFIKLHLPKQYQEIFNNAEIDGYAGYIDGKTKQVDFYKYLKTTLENVEGADYFITKIEEENFLRKQRTFDNGVIPHQLHLEELEAILHQQAKYYPFLREGYDKIKSLVTFRIPYFVGPLANGQSEFAWLTRKDDGEIRPWNIEEKVDFGKSAVDFIEKMTNKDTYLPKENVLPKHSLCYQKYMVYNELTKIRYIDDQGKTNYFSGREKQQIFNDLFKQKRKVKKKDLELFLRNINHIESPTIEGLEDSFNASYATYHDLLKVGLKQEILDNPLNTEILEDIVKILTVFEDKRMIKEQLEQFSDVLDGVVLKKLERRHYTGWGRLSAKLLVGIRDKQSHLTILDYLMNDDGLNRNLMQLINDSNLSFKSIIEKEQVSTTDKDLQSIVADLAGSPAIKKGILQSLKIVDELVSIMGYPPQTIVVEMARENQTTGKGKNNSKPRYKSLEKAIKDFGSQILKEHPTDNQELKNNRLYLYYLQNGKDIYTGQELDIHNLSNYDIDHIVPQSFITDNSIDNLVLTSSAGNREKGGDVPPLEIVRKRKVFWEKLYQGNLMSKRKFDYLTKAERGGLTEADKARFIHRQLVETRQITKNVANILHQRFNKETDNHGNTMEQVRIVTLKSALVSQFRKQFQLYKVREVNDYHHAHDAYLNGVVANTLLKVYPQLEPEFVYGEYHQFDWFKANKATAKKQFYTNIMLFFAQKERIIDENGEILWDKKYLETIKKVLDYRQINIVKKTEIQKGEFSKATIKPKGNSSKLIPRKENWDPVKYGGLDSPNMAYAVIIEHAKGKKKIVIEKKLIQINIMERKMFEKDEEAFLEEKGYHQPKVLTKLPKYTLYECEKGRRRMLSSANEAQKGNQLVLSNHLVSLLYHAKNCEASDGKSLKYIEAHRETFSELLAQVSEFATKYTLADANLSKINNLFEQNKEGDIKAIAQSFVDLMAFNAMGAPASFKFFEATIDRKRYTNLKELLSSTIIYQSITGLYESRKRLDD

SEQ ID NO: 313 - protein, 1334 aa, Listeria monocytogenes
  Listeria monocytogenes serotype 1/2a str. F6854
MKNPYTIGLDIGTNSVGWAVLTNQYDLVKRKMKVAGNSDKKQIKKNFWGVRLFDDGQTAVDRRMNRTARRRIERRRNRISYLQEIFAVEMANIDANFFCRLNDSFYVDSEKRNSRHPFFATIEEEVAYHDNYRTIYHLREKLVNSSEKADLRLVYLALAHIIKYRGNFLIEGALDTKNTSVDEVYKQFIETYNQVFMSNIEEGALAKVEENIEVANILAGKFTRREKFERILQLYPGEKSTGMFAQFISLIVGSKGNFQKVFDLIEKTDIECAKDSYEEDLETLLAIIGDEYAELFVAAKNTYNAVVLSSIITVTDTETNAKLSASMIERFDAHEKDLVELKAFIKLNLPKQYEEIFSNAAIDGYAGYIDGKTKQVDFYKYLKTILENIEGSDYFIAKIEEENFLRKQRTFDNGAIPHQLHLEELEAIIHQQAKYYPFLKEDYDKIKSLVTFRIPYFVGPLANGQSEFAWLTRKADGEIRPWNIEEKVDFGKSAVDFIEKMTNKDTYLPKENVLPKHSLCYQKYMVYNELTKIRYIDDQGKTNYFSGREKQQVFNDLFKQKRKVKKKDLELFLRNINHIESPTIEGLEDSFNASYATYHDLLKVGMKQEILDNPLNTEMLEDIVKILTVFEDKPMIKEQLQQFSDVLDGGVLKKLERRHYTGWGRLSAKLLVGIREKQSHLTILDYLMNDDGLNRNLMQLINDSNLSFKSIIEKEQVSTTDKDLQSIVAELAGSPAIKKGILQSLKIVDELVSIMGYPPQTIVVEMARENQTTGKGKNNSKPRYKSLEKAIKEFGSQILKEHPTDNQELKNNRLYLYYLQNGKDMYTGQELDIHNLSNYDIDHIVPQSFITDNSIDNLVLTSSAGNREKGGDVPPLEIVRKRKVFWEKLYQGNLMSKRKFDYLTKAERGGLTEADKARFIHRQLVETRQITKNVANILYQRFNKETDNHGNTMEQVRIVTLKSALVSQFRKQFQLYKVREVNGYHHAHDAYLNGVVANTLLKVYPQLEPEFVYGEYHQFDWFKANKATAKKQFYTNIMLFFAQKERIIDENGEILWDKKYLETIKKVLDYRQMNIVKKTEIQKGEFSKATIKPKGNSSKLIPRKENWDPMKYGGLDSPNMAYAVIIEHAKGKKKIVIEKKLIQINIMERKMFEKDEEAFLEEKGYRHPKVLTKLPKYTLYECEKGRRRMLASANEAQKGNQLVLSNHLVSLLYHAKNCEASDGKSLKYIEAHRETFSELLAQVSEFATRYTLADANLSKINNLFEQNKEGDIKAIAQSFVDLMAFNAMGAPASFKFFEATIDRKRYTNLKELLSSTIIYQSITGLYESRKRLDD

SEQ ID NO: 314 - protein, 1087 aa, Listeriaceae bacterium
  Listeriaceae bacterium TTU M1-001
MKKLVLGLDIGVASVGWGIIDAENGDVVDTGVRLFSSRDASENESRRTSRQSRRLSRRKKHRRERIKQLLLAHDMDICDIVNENPYELRVKGLNEKLEVSEIYVALTHLAKRRGVSYLDDVVEEGGTIKSEHLNKNMEEIKSGKMPCEIQLERFEKYGQVRGMIEINQDTEESSFLVNIFRTSDYIKEAKTILATQQKFHKQITNEFIDEYIHIMASKRDYFIGPGNEKSRTDYGVYRTNGDTWDNLFEILIGKCSVFPEETRAARSSYVAQEFNLLNDLNNLKISNLESGKLSASQKHDIVEKVKNSKKFGTKDLLKYIASVCECKIEDIGGCRVDKNRKPIMHTFENYRKVHNALNEAGVDLRLSETDYDELMKIMTLNSETLEIKKQCKEKLPQLTEDYLNVCLVLNKKGAFSGWHALSLKAMKLMMPELYGTSKNQMQIIHTMQLGKAYLKPLNQQKYLNSEAILEEIYNPIAARSIRQTIKVTNAILKKYGHLDSVIIEMPRDYQTSEDERKMIEKMQKENEKEKKAALKRAREEYPFPDEAFRNHKELATKLRLWYQQDQFCVYSGRKISVVDLVRNPNQFEIDHIIPQSVSLDDSLNNKVLCFSEENQKKGQQTPFYYHKGKSGNWTYEQYKLFVEKLFDKKKISNKKRELLLFEEDINKWDVRRGFIARNLVDTRYASRVILNSYQQYFGNHEMGTKVKVVRGKFTSQLRKKWRIFKDRNESHSHHAIDALIVAATANLRLWKKNTLGVSDEGKVYDKETGEILPFEKLTESEYNEMMNKEPYLNFKTKLQNIETKVKYSYRVSKKVNRKISDATIYSTRERDGIDYIVGKIKNIYDVKTYKDQFLKRYKKNKEQFLMYQHDPQTFAILENIMATYQDAENPFLAYKKEYGVIRKYSKKGGGSPVTSLKFIDKVLGQKIDLTAKNQAALPKNKKVVLQSITPYRADVYYDEIDKRYHLIGVKYSLFSFSKQGYVINPIAYQKLLEKEQIHSEMKFCFSLYREDIIEFGEDPDSLTRYRFWSKNESGKNKIEVKPIEKPNFEKQTVLTITKKIKILNKYQTDVLGNSFKAQEEKDPRNIE

SEQ ID NO: 315 - protein, 1345 aa, Marinilabilia sp.
  Marinilabilia sp. AK2
MKKILGLDLGTTSIGWAFIKEPEKDVVGSEIVDMGVRIVALSSDEENDFAKGNTISINADRTLKRGARRNLQRFKLRRDALLEIFKEMKLIPSNFKYAEDGPSSTFSTLKLRDKAAKEKIELDDLVKVLLQINKKRGYRSSRKAKSEEDDGSAIDSMGIAKELYENDLTPGQWVFEALQKGRKNVPDFYRSDLQEEFKKIVNYQSEFYPDVLNSSFVEDWMGKASTPTKQYFNKKGVHLAENKGKREERRLQEYNWRAVAVNSKIDLSEIALILSQINSQISNSSGYLGAISDRSKELYFKNQTVGQYLYQQIKINPHTRLKGQVFYRQDYLDEFEKIWSVQSGFHPQLNDALKKEIRDITIFFQRRLKSQKHLISNCEFEDYHKVVPKSHPIFQEFRIWQNLNNLTLIKKDNLNEKSELALEDKIALANELAFKREQSVKDALNILGLKSSEWEFNFTKIEGNRTNHAFFEAFAKIIEIEDGEPLDLGNLKADDILDQFSEAFLRIGIDPGLLQVNNDIEGPNYEKQPYIQFWHLLYSSEDDQKLKQNLIKKFGFKPDHAKILASISLQDDHASLSSRAIKKILPHLQSGLIYDKACTYAGYNHSSSFTKEENEKRELSSELDLLKKNSLRNPVVEKILNQMINVVNAILKDPNLGKPDEIRVEMARELKANAEQRKNMTSNIASATRDHEKYREILKKEFGLKRVTKNDLLRYKLWLETDGISLYTGKPIEASKLFSKEYDIEHIIPKTRLFDDSFSNKTICERQLNIDKANVTAFSFLQNKLSGDEFEQYQSRVKSLFGKLSKAKIQKLLMANDKIPEDFIARQLQETRYISKKAKEILFEITRRVSVTTGTITDKLREDWGLVEIMKELNWEKYDKLGLTYTIEGKHGERLNKIKDWSKRNDHRHHAMDALTVALTKPAYIQYLNNLNAKELNGKKSTEIFAIEQKYLKRENGKLCFIPPVENIRTEAKKHLSKVLISYKAKNKVVTINKNRTNKKAGFNEQIALTPRGQLHKETVYGKAFHYSTKFEKIGASFDVQKINAVAKKEEREALLKRLAENGDDPKKAFTGKNSLSKMPIYLDLKRNIKLPEKVKTVVLEQNYTIRKNIDPDLKLDKVIDVGVKRILENRLKEFGGNAKLALSNLDENPIWLNKEKGITIKRVKISGVSNVESLHVKKDHFGEPILDQVGNEIPVDFVSTGNNHHVAIYEDEKGNLQEEVVSFFEAVVRQNQGLPIINKNHSLGWKFLFTLKQNEYFVFPSDDFDPTDVDLMDEENYHLISPNLFRVQKFTTKDYFFRHHLETTVEDKSELKGVSFKRLGLPGLNCIKKIRINHLGKIIQVGEY

SEQ ID NO: 316 - protein, 1352 aa, Megasphaera sp.
  Megasphaera sp. UPII 135-E
MKKRNREEYYVGLDIGTSSVGWAVATPDYRIPKFRGHKMWGSRLFAEGKRAAERRQFRTNRRRLARRRDRLQILEELFAEEMAKVDNTFFMRLKESKFFLEDKTVKEKHILFSTDKFDADRFYKDNPTIYHVRKRLMEEEPQDIRELFLAVHHILKYRGHFLFAGSLEQNGASIEELVRTLLGKQGLAILDDTIDSNEMVNILKNTGETKSDRKKDVQELWNPLKDKVKKAQAAEMAGLVLGLKSDISKLFANSDYKDLDSSIKNINFSSGDYEEKRDDYANSIGDDIVLLDTMKALYDTLILSQILQGKRSISAAKVEDYNTHKEQLRALKAILKPHKRLYNEMFRENNKKDLSNYVAYISSYSEGKRVNREGFYKYVQAVLKQVDDSDSKQAILEAIRLETFLPLLRVKDNAVIPHQIHQAELEAILETARKKYNFLNDVSDGVSVKDKIIQLFTFRIPYYVGPLNPHSGETVADRKQGTGWVVRKQRGKVYPWNFADMVDVKASAEAFITNLTNKCTYLIGEDVLPKRSLLYSEFMLLNELNMIKYDGHELPVAIKQLYIEQVFKQEHKKQTKGRVLDFLKRNGLITGSATAVITGMDDAIKGDLQSYRDMVRIFGAGFDHSMAERIIRWVTLFGEAKDILENKIREVYGNSISDSQMRAIKKLKYADWGRLSQAFLIAVKGCDKSGVERNIITCLRASSQNLMEILSDQGTYIKQIKAWNHQHTTNMMDTLDYQLVDDLYVAPSVKRSIWQSLCIVEELVKIMGQAPKKIFVEVTRTKQAEKTKKDSRKKRLVELYTAIGKEGAAWKKEIEAHQAGDFRRKKLYLYYTQMGRCMYSNEPIAMDALFTSAYDIDHIYPQSLTKDGSWDNLVLVKSQLNKEKSDQYPLRPAIREKNKAHWQYLCRAGFISEKKYERLMRTTELTAEELSGFIARQLVETSQATKAVTGLLERIYTNTEICFVKAETVSQFRHQHNFIKIRELNNYHHAKDAYLNIVVGNVYHEKFTKNPWEFIARSTERRPYNLNRMYDFDLLKQGRVIWQVPKSLETVQAMMKSNDVRITKKLLVQKGELYDATITKAHKAKEGTYFPLKGADARLRDVHRYGGYEKIKIAYYSVFSCREKASNTIHTLIIPIPVYKAGLLQTEADLTAYAWQTKQKTKPIKDIYSAITPIYKKLCINTVVKIDGFKYFLGGKTGDYMWLDPAIPVVLDEQAAAYLKAISKVGRADDVENTAQAIDLITAEANEAFYDVLLKKMEAKIFAKAYQTIVEKLASETARERFRELSIGAQCSCLLEILNLLANNKTTFTFFKDKMGVTMSRRKQPMDLTKLEECIVYETSITGLYEKAVSLL

SEQ ID NO: 317 - protein, 1080 aa, Methylocystis sp.
  Methylocystis sp. ATCC 49242
MRVLGLDGGIASIGWALIEIFEDHEPSDGRIIDTGAWMFDAPEEKSQTGTKLKSELRRIFRGQRRVIRRRRQRMNEVRRILHRHGLLSSDNRDALKQPGLDPWKIRAEGIDRLLSPIEFAVALGHIARHRGFKSNSKGAKTSDLDAESSRMKKAVGETREKLARFGSPAKLLVEDEGFVLRQTKLKSGALETVRRFRNRDGDYSRSLLRDDLAAEVRALFRAQARLQSTFAKVELEAEFTQAAFFQRPLQDSERLVGPCPFEPAEKRSPKRGYSFELFRFLSRLNHLTLREGSEERTLTVEELRTAAADFGGVAKFTFSTLRKRLALPDIAIFVGIKADDEKKLDVVARSGEAATGTARLRRVVIDALGELAWGALISAPERLDKITEIITFRSDLDRIRAGLIEAGFDTPLIEAIVRAAADGKLDAFTGVGHISAKAARNIIPGLMRGMTYDKACAAAGYDHTASRERDAFDVGMHGKEALKKILQEERISRELVGSPSARKALIEAVKQVKAIIEKYGVPDRIHVELARDVGKSIEERRDIHFGIEKRSRQKDKLRELFGKEVGHLPQDGERGKEELLRFELWNEQMGRCLYTDEYINPKQLVASDNSVQVDHILPWSRFGDDSYLNKTLCTAKANQDKKGRTPYEWFRADKPEAEWDAFVARVESIQFMKGLKKRNYKLKNAEEAAEKFRSRNLNDTRWTCRLLAEALKQLYPKGEKDKDGKERRRVFTRPGALTNRLRRAWSLQRRKKSEKGERIADDRHHALDAIIVAATTESLLIRATREVQDIERKGLHYDLTKNITQPWPGFADEALDAVEKVFVARAERRRARGKAHDATIRHIAVRDDEAKVYERKKVGDIKLGDLIRVKDAERNAPLIENLRKWIEAGSPRDNPPLSPKGDPVSKVRLVTKNKVNITLDTGNPERLATVDRGEMARVDVFRKANRKGKYEYYLVPIYPHEIATMETPPMRAVQGGGDDDKWPEIDSTFEFLWSINQLSLLELTKPDGEVIRSYFRSLDRNTGALTVSGIANSTATRKGIGTRTLIDFKKLHVDRLGQIFEVERELRTWRGETWRGKDCI

SEQ ID NO: 318 - protein, 1082 aa, Methylosinus trichosporium
  Methylosinus trichosporium OB3b
MRVLGLDAGIASLGWALIEIEESNRGELSQGTIIGAGTWMFDAPEEKTQAGAKLKSEQRRTFRGQRRVVRRRRQRMNEVRRILHSHGLLPSSDRDALKQPGLDPWRIRAEALDRLLGPVELAVALGHIARHRGFKSNSKGAKTNDPADDTSKMKRAVNETREKLARFGSAAKMLVEDESFVLRQTPTKNGASEIVRRFRNREGDYSRSLLRDDLAAEMRALFTAQARFQSAIATADLQTAFTKAAFFQRPLQDSEKLVGPCPFEVDEKRAPKRGYSFELFRFLSRLNHVTLRDGKQERTLTRDELALAAADFGAAAKVSFTALRKKLKLPETTVFVGVKADEESKLDVVARSGKAAEGTARLRSVIVDALGELAWGALLCSPEKLDKIAEVISFRSDIGRISEGLAQAGCNAPLVDALTAAASDGRFDPFTGAGHISSKAARNILSGLRQGMTYDKACCAADYDHTASRERGAFDVGGHGREALKRILQEERISRELVGSPTARKALIESIKQVKAIVERYGVPDRIHVELARDVGKSIEEREEITRGIEKRNRQKDKLRGLFEKEVGRPPQDGARGKEELLRFELWSEQMGRCLYTDDYISPSQLVATDDAVQVDHILPWSRFADDSYANKTLCMAKANQDKKGRTPYEWFKAEKTDTEWDAFIVRVEALADMKGFKKRNYKLRNAEEAAAKFRNRNLNDTRWACRLLAEALKQLYPKGEKDKDGKERRRVFSRPGALTDRLRRAWGLQWMKKSTKGDRIPDDRHHALDAIVIAATTESLLQRATREVQEIEDKGLHYDLVKNVTPPWPGFREQAVEAVEKVFVARAERRRARGKAHDATIRHIAVREGEQRVYERRKVAELKLADLDRVKDAERNARLIEKLRNWIEAGSPKDDPPLSPKGDPIFKVRLVTKSKVNIALDTGNPKRPGTVDRGEMARVDVFRKASKKGKYEYYLVPIYPHDIATMKTPPIRAVQAYKPEDEWPEMDSSYEFCWSLVPMTYLQVISSKGEIFEGYYRGMNRSVGAIQLSAHSNSSDVVQGIGARTLTEFKKFNVDRFGRKHEVERELRTWRGETWRGKAYI

SEQ ID NO: 319 - protein, 1123 aa, Mobiluncus curtisii
  Mobiluncus curtisii subsp. holmesii ATCC 35242
MFVYLNSPRGFGPATFLTDLPHFCIIFGNNDFMDNRKYHVGIDVGTNSVGFAAVEVGDSGSPIRFLNTMVVIHDSGVDPEQKKYAITRLASAGTARRTRRLYRTRRQRLRELDDFISNELGYPLVNLENFADPYEPWKVRADLATIKLPADELPEAMSIALRHMARHRGWRSPYQRVEALHLHAEISEEFSALKKRVMEKTGDVFSDDATPAEVLVDLMGRQKIRGADGMLSGKLRQSDNANELRKIASVQGIDDETLNRIIDRVFFSRSPKGKASERVGMDALPGQGSKPRALKAMPSFQKFRIVSVICNLRIKDSGDDNRPLSMEEKEQLIGYLMSSTTDDHVTWTDVAELLHVKRSNLQGTAKEGPDGERPYTRPPVNSAWSKIKDSKIKSLVALWKTGDVDVQSAIVEALSNASVLEDARPGADIVVAYLESLDDKELESLDKVGLPAGRASYSEDSLERLTERMLQDDCDLFEARKREFGVSDDWKPPADPIYAPVGNPGVDRVLKIVNRLLMAAEREWGAPTQINIEHVRSGFSSELMQREFERENERRRAQNEEAVKAILTEKGGNSHVSKYDIIRYYAVKRQNCQCLYCGTPITFSDCELDHIVPRKGVGSTNSRVNLAAACRSCNRDKSNLPFAVWAGKTSNFDVSIDGAVSRVKQWQRSQNEGAREFRAFQNEVISRLLKTTEDPEIDSRSLESVAWMARELHHRVEYYFQSKGAQTQVSVYRGAVTAQARKSSGLEDKVKMIGGGGKTRLDRRHHAMDAATIALMTPGISTTLSEKNNLRDAQKFTGQSETWKDYCGRTETAREHFAVWKSNMERLTDLFNDKLENDAIPVVQPLRLRLSDSKAHDDGIGKLDSKKLGSVWSLADIDRAATPQIWTALTRCDDFDPTKGLPENANRVIRAQGVKYESEDNIPVFPSNVAAIAVRDGYAEIGSTIHHARIYRIDDGKKIFYSMIRVFAVDLLKHQAEDLFTVKLPPSAISIRTCEDSLRRALSNGTAEYLGWLVPGDEIIVDTSDKAFHTGQIGDLLRNFPVNSFRLTGFPSNSRLRLKPVLLAGEGLRDDAEDSIKKILSGQGWRPAINVLFSKGKPRIVRRNSLGIERPSSNNGLPFSWEA

SEQ ID NO: 320 - protein, 1091 aa, Mobiluncus mulieris
  Mobiluncus mulieris 28-1
MDSRKYRVGIDVGTNSVGFAAVEEDDSGSPTRFLNTMVVIHDSGVDPEQKKYAITRLASAGTARRTRRLYRTRRQRLRELDDFISNELGYPLVNLENFADPYEPWKVRADLATTKLPNDELPEAMSIALRHMARHRGWRSPYQRVEALHLHAEISKEFAALKERVVEKTGDVFSDDATPAEVLVDLMGRQKVRGADGVLSGKLRQSDNANELRKIASVQGIDDETLNRIIDRVFSSKSPKGKASERVGMDALPGQGSKPRALKAMPSFQKFRVVSVICNLRIKDSGGDARPLSMEEKEKLIDYLMSSTTDDHVTWTDVADLLHVKRSQLQGTAKEGFDGERPYTRPPVNSTWSKIKDSKIKSLVALWKTGDVDVQSAIVEALSNASVLEDSRPGADIVVAYLESLDDKELESLDKVGLPAGRASYSEDSLERLTERMLRDDCDLFEARKREFNVADDWKPPADPIYAPVGNPGVDRVLKIVNRLLMAAEREWGAPTQINIEHVRSGFSSELMQREFERENERRRAQNEEAVKAILTEKGGNSRVSKYDITRYYAVKRQHCQCLYCGTPITFSDCELDHIVPRKGVGSTNTRVNLAAACRSCNRDKSNLPFAVWAGKASNFDVSIDDAVSRVKQWQRSQNEGVREFRAFQNEVISRLLKTTEDPEIDSRSLESVAWMARELHHRVEYYFQSKGAQTQVSVYRGAVTAQARKSSGLEDKVKMIGGGGKTRLDRRHHAMDAATIALMTPGISTTLSEKNNLRDAQKFTGQSETWKDYCGRTETARKHFAVWKSNMERLTDLFNDKLENDAIPVVQPLRLRLSNSKAHDDGIGKLDSKKLGSVWSLADIDRAATPQIWTALTRCDDFDPTKGLPENANRVIRAQGVKYESEDNIPVFPSNVAAIAVRDGYAEIGSTIHHARIYRIDDGKKTFYSMIRVFAVDLLKHQAEDLFTVKLPPSAISIRTCEDSLRRALSNGTAEYLGWLVPGDEIIVDTSDKAFHTGQIGDLLRNFPVNSFRLTGFPSNSRLRLKPVLLAGEGLRDDAEDSIKKILLGQGWRPAINVLFSKGKPRIVRRNSLGIERPSSNNGLPFSWEA

SEQ ID NO: 321 - protein, 1091 aa, Mobiluncus mulieris
  Mobiluncus mulieris FB024-16
MDSRKYRVGIDVGTNSVGFAAVEEDDSGSPTRFLNTMVVIHDSGVDSEQKKYAITRLASAGTARRTRRLYRTRRQRLRELDDFISNELGYPLVNLENFADPYEPWKVRADLATTKLPNDELPEAMSIALRHMARHRGWRSPYQRVEALHLHAEISKEFAALKERVVEKTGDVFSDDATPAEVLVDLMGRQKVRGADGVLSGKLRQSDNANELRKIASVQGIDDETLNRIIDRVFSSKSPKGKASERVGMDALPGQGSKPRALKAMPSFQKFRVVSVICNLRIKDSGGDARPLSMEEKEKLIDYLMSSTTDDHVTWTDVADLLHVKRSQLQGTAKEGFDGERPYTRPPVNSTWSKIKDSKIKSLVALWKTGDVDVQSAIVEALSNASVLEDSRPGADIVVAYLESLDDKELESLDKVGLPAGRASYSEDSLERLTERMLRDDCDLFEARKREFNVADDWKPPADPIYAPVGNPGVDRVLKIVNRLLMAAEREWGAPTQINIEHVRSGFSSELMQREFERENERRRAQNEEAVKAILTEKGGNSRVSKYDITRYYAVKRQHCQCLYCGTPITFSDCELDHIVPRKGVGSTNTRVNLAAACRSCNRDKSNLPFAVWAGKASNFDVSIDDAVSRVKQWQRSQNEGVREFRAFQNEVISRLLKTTEDPEIDSRSLESVAWMARELHHRVEYYFQSKGAQTQVSVYRGAVTAQARKSSGLEDKVKMIGGGGKTRLDRRHHAMDAATIALMTPGISTTLSEKNNLRDAQKFTGQSETWKDYCGRTETARKHFAVWKSNMERLTDLFNDKLENDAIPVVQPLRLRLSNSKAHDDGIGKLDSKKLGSVWSLADIDRAATPQIWTALTRCDDFDPTKGLPENANRVIRAQGVKYESEDNIPVFPSNVAAIAVRDGYAEIGSTIHHARIYRIDDGKKTFYSMIRVFAVDLLKHQAEDLFTVKLPPSAISIRTCEDSLRRALSNGTAEYLGWLVPGDEIIVDTSDKAFHTGQIGDLLRNFPVNSFRLTGFPSNSRLRLKPVLLAGEGLRDDAEDSIKKILLGQGWRPAINVLFSKGKPRIVRRNSLGIERPSSNNGLPFSWEA

SEQ ID NO: 322 - protein, 1473 aa, Mucilaginibacter paludis
  Mucilaginibacter paludis DSM 18603
MKNILGLDLGTNSIGWALIEKDTDQKNGNILGTGSRIIPMSQDIKDEFGKGNSISQTADRTKFRSVRRLRERHLLRRERLHRVLNVLGFLPKHYADQIDFKKRLGKLVNETEPKLVYDNKNFIFKKSFEAMLSDFNQHQPLLLADGKKVPFDWTIYYLRKKALTEKIEKEELAWLILNFNQKRGYYQLRGEEEEENPNKMVAFHSLKIVEVIADESQKGKAETWYSLILENGWIYRRSSKTPLYDWKGKQRDFIVTTDLNDDGSIKTDKEGLEKRSFRAPVEDDWTLVKKKTEQEINRSHKTVGTYIYENLLQDPKQKIKGKLVRTIEREFYKDELKMILKNQQKFHPELNDEHLYINCVRELYRNNQAHQTILSKKDFVHLFIDDIIFYQRPLRSQKSSISNCTLEFRKYKNENGTDQTDYLKAIPKSHPLFQEFRLWQWIYNLGIYQKEDDTNVTDELIKNIDGYQDLFDFLNNKKEIRQDILIKFLVEQTGLKGKPLSSVVAKYRWNFVEDKIYPCNETGTQIRTRLAKVENTPEDFLTAETEIKLWHIIYSVNDKADYEKALKTFAEKHNLDTHSFVENFKKFPPFKSEYGSFSEKAIKKLLPLIRLGKYWSWENIDKKTQERIEKILTGEFDEAIKSRVRDKAIHLTEEDHFQGLQLWLASYVVYGRHSEADNLDKWHTVADLEDYLAEFRQHSLRNPIVEQVITETLRVVKDIWLQYGQGAKDFFSEIHIELAREMKNTGDERKRLTSLVTDNENTNLRIKVLLSELLNDGNVENVRPYSPMQQEALKIFEDGVLNSDIEIEDDILKISKMAQPTNTELKRYKLWLEQKYRSPYTGQIIPLNRLFTADYEIEHIIPQSRFFDDSFSNKIICESAVNQLKDKQLGLEFIKNHSGTIVKLGMGKTAKILDVESYNEFVKGNYTKNISKRNKLMLEEIPDKMIERQLNDTRYISKFIISALSNIVRSESNDDGFNSKNVLPGNGKITSRLKQDWGMNDIWNELILPRFERMNKITDSAVFTAWNENNQKFLPIVPLEFSKGFQKKRIDHRHHALDALVIAASTREHINLLNNEHAKSDKRFDLNRKLRKFEKVAYNDPKTGKRIEKEVPTIFLKPWETFTVDAKNSLESIIVSFKQNLRVINRATNYSESYNDENGALRLGKDGNPLKEKIKQSKGDSWAIRKPMHKDFVYGKVHLQNVKLPKDKFITAIRKSLDVTFDLKRIETITDTGIQKILKNYLHSKENKVELAFSPEGIEDMNQHIERYNDGKKHQPIHKVRVFEIGSRFSLGESGNKKTKFVEAAKGTNLFFAVYQDDNKGKRNYETIPLNIVIERQKLGLHSVPTEDAKGGKLLFHLSPNDMVYVPTSEELEDNLASVNIKRLNTAQRKRIYKVEKASGVECYFIRQDIAYLIKNYDAKTKIGELESQNKLQTTMTDDRLKITDVCVKLNIDRLGSIAETFLGNQYGASKKT

SEQ ID NO: 323 - protein, 1233 aa, Mycoplasma canis
  Mycoplasma canis PG 14
MEKKRKVTLGFDLGIASVGWAIVDSETNQVYKLGSRLFDAPDTNLERRTQRGTRRLLRRRKYRNQKFYNLVKRTEVFGLSSREAIENRFRELSIKYPNIIELKTKALSQEVCPDEIAWILHDYLKNRGYFYDEKETKEDFDQQTVESMPSYKLNEFYKKYGYFKGALSQPTESEMKDNKDLKEAFFFDFSNKEWLKEINYFFNVQKNILSETFIEEFKKIFSFTRDISKGPGSDNMPSPYGIFGEFGDNGQGGRYEHIWDKNIGKCSIFTNEQRAPKYLPSALIFNFLNELANIRLYSTDKKNIQPLWKLSSVDKLNILLNLFNLPISEKKKKLTSTNINDIVKKESIKSIMISVEDIDMIKDEWAGKEPNVYGVGLSGLNIEESAKENKFKFQDLKILNVLINLLDNVGIKFEFKDRNDIIKNLELLDNLYLFLIYQKESNNKDSSIDLFIAKNESLNIENLKLKLKEFLLGAGNEFENHNSKTHSLSKKAIDEILPKLLDNNEGWNLEAIKNYDEEIKSQIEDNSSLMAKQDKKYLNDNFLKDAILPPNVKVTFQQAILIFNKIIQKFSKDFEIDKVVIELAREMTQDQENDALKGIAKAQKSKKSLVEERLEANNIDKSVFNDKYEKLIYKIFLWISQDFKDPYTGAQISVNEIVNNKVEIDHIIPYSLCFDDSSANKVLVHKQSNQEKSNSLPYEYIKQGHSGWNWDEFTKYVKRVFVNNVDSILSKKERLKKSENLLTASYDGYDKLGFLARNLNDTRYATILFRDQLNNYAEHHLIDNKKMFKVIAMNGAVTSFIRKNMSYDNKLRLKDRSDFSHHAYDAAIIALFSNKTKTLYNLIDPSLNGIISKRSEGYWVIEDRYTGEIKELKKEDWTSIKNNVQARKIAKEIEEYLIDLDDEVFFSRKTKRKTNRQLYNETIYGIATKTDEDGITNYYKKEKFSILDDKDIYLRLLREREKFVINQSNPEVIDQIIEIIESYGKENNIPSRDEAINIKYTKNKINYNLYLKQYMRSLTKSLDQFSEEFINQMIANKTFVLYNPTKNTTRKIKFLRLVNDVKINDIRKNQVINKFNGKNNEPKAFYENINSLGAIVFKNSANNFKTLSINTQIAIFGDKNWDIEDFKTYNMEKIEKYKEIYGIDKTYNFHSFIFPGTILLDKQNKEFYYISSIQTVRDIIEIKFLNKIEFKDENKNQDTSKTPKRLMFGIKSIMNNYEQVDISPFGINKKIFE

SEQ ID NO: 324 - protein, 1233 aa, Mycoplasma canis; identical to SEQ ID NO: 323
  Mycoplasma canis PG 14

SEQ ID NO: 325 - protein, 1233 aa, Mycoplasma canis
  Mycoplasma canis UF31
MEKKRKVTLGFDLGIASIGWAIVDSETNQVYKLGSRLFDAPDTNLERRTQRGTRRLLRRRKYRNQKFYNLVKRTEVFGLSSREAIENRFRELSIKYPNIIELKTKALSQEVCPDEIAWILHDYLKNRGYFYDEKETKEDFDQQTVESMPSYKLNEFYKKYGYFKGALSQPTESEMKDNKDLKEAFFFDFSNKEWLKEINYFFNVQKNILSETFIEEFKKIFSFTRDISKGPGSDNMPSPYGIFGEFGDNGQGGRYEHIWDKNIGKCSIFTNEQRAPKYLPSALIFNFLNELANIRLYSTDKKNIQPLWKLSSIDKLNILLNLFNLPISEKKKKLTNANINDIVKKESTKSIMLSVEDIDMIKDEWAGKEPNVYGVGLSGLNIEESAKENKFKFQDLKILNVLINLLDNVGIKFEFKDRNDIIKNLELLDNLYLFLIYQKESNNKDSSIDLFIAKNELLNIENLKLKLKEFLLGAGNEFENHNSKTHSLSKKAIDAILPKLLDNNEGWNLEAIKNYDEEIKSQIEDNSSLMAKQDKKYLNDNFLKDAILPPNVKVTFQQAILIFNKIIQKFSKDFEIDKVVIELAREMTQDQENDALKGIAKAQKSKKSLVEERLEANNIDKSVFNDKYEKLIYKIFLWISQDFKDPYTGAQISTNEIVNNKVEIDHIIPYSLCFDDSSANKVLVHKQSNQEKSNSLPYEYIKQGHSGWNWDEFTKYVKRVFVNNVDSILSKKERLKKSENLLTTSYDGYDKLGFLARNLNDTRYATILFRDQLNNYAEHHLIDNKKMFKVIAMNGAVTSFIRKNMSYDNKLRLKDRSDFSHHAYDAAIIALFSNKTKTLYNLIDPSLNGIISKRSEGYWVIEDRYTGEIKELKKEDWTSIKNNVQARKIAKEIEEYLIDLDDEVFFSRKTKRKTNRQLYNETIYGIAAKTDEDGITNYYKKEKFSILDDKDIYLRLLREREKFVINQSNPEVIDQIIEIIESYGKENNIPSRDEAINIKYTKNKINYNLYLKQYMRSLTKSLDQFSEEFINQMIANKTFVLYNPTKNTTRKIKFLRLVNDVKINDIRKNQVINKFNGKNNEPKAFYENINSLGAIVFKNSANNFKTLSINTQIAIFGDKNWDIEDFKTYNMEKIEKYKEIYGIDKTYNFHSFIFPGTILLDKQNKEFYYISSIQTVRDIIEIKFLNKIEFKDENKNPDTSKTPKRLMFGIKSIMNNYEQVDISPFGINKKIFE

SEQ ID NO: 326 - protein, 1233 aa, Mycoplasma canis
  Mycoplasma canis UF33
MEKKRKVTLGFDLGIASVGWAIVDSETNQVYKLGSRLFDAPDTNLERRTQRGTRRLLRRRKYRNQKFYNLVKRTEVFGLSSREAIENRFRELSIKYPNIIELKTKALSQEVCPDEIAWILHDYLKNRGYFYDEKETKEDFDQQTVESMPSYKLNEFYKKYGYFKGALSQPTESEMKDNKDLKEAFFFDFSNKEWLKEINYFFNVQKNILSETFIEEFKKIFSFTRDISKGPGSDNMPSPYGIFGEFGDNGQGGRYEHIWDKNIGKCSIFTNEQRAPKYLPSALIFNFLNELANIRLYSTDKKNIQPLWKLSSVDKLNILLNLFNLPISEKKKKLTSTNINDIVKKESIKSIMISVEDIDMIKDEWAGKEPNVYGVGLSGLNIEENAKENKFKFQDLKILNVLINLLDNVGIKFEFKDRNDIIKNLELLDNLYLFLIYQKESNNKDSSIDLFIAKNKSLNIENLKLKLKEFLLGAGNEFENHNSKSHSLSKKAIDAILPKLLDNNEGWNLEAIKNYDEEIKSQIEDNSSLMAKQDKKYLNDNFLKDAILPPNVKVTFQQAILIFNKIIQKFSKDFEIDKVVIELAREMTQDQENDALKGMAKAQKSKKSLVEERLEANNIDKSVFNDKYEKLIYKIFLWISQDFKDPYTGAQISVNEIVNNKVEIDHIIPYSLCFDDSSANKVLVHKQSNQEKSNSLPYEYIKQGHSGWNWDEFTKYVKRVFVNNVDSILSKKERLKKSENLLTTSYDGYDKLGFLARNLNDTRYATILFRDQLNNYAEHHLIDNKKMFKVIAMNGAVTSFIRKNMSYDNKLRLKDRSDFSHHAYDAAIIALFSNKTKTLYNLIDPSLNGIISKRSEGYWVIEDRYTGEIKELKKEDWTSIKNNVQARKIAKEIEEYLIDLDDEVFFSRKTKRKTNRQLYNETIYGIAAKTDEDGITNYYKKEKFSILDDKDIYLRLLREREKFVINQSNPEVIDQIIEIIESYGKENNIPSRDEAINIKYTKNKINYNLYLKQYMRSLTKSLDKFSEEFINQMIANKTFVLYNPTKNTTRKIKFLRLVNDVKINDIRKNQVINKFNGKNNEPKAFYENINSLGAIVFKNSANNFKTLSINTQIAIFGDKNWDIEDFKTYNMEKIEKYKEIYGIDKTYNFHSFIFPGTILLDKQNKEFYYISSIQTVRDIIEIKFLNKIEFKDENKNQDTSKTPKRLMFGIKSIMNNYEQVDISPFGINKKIFE

SEQ ID NO: 327 - protein, 1233 aa, Mycoplasma canis
  Mycoplasma canis UFG1
MEKKRKVTLGFDLGIASVGWAIVDSETNQVYKLGSRLFDAPDTNLERRTQRGTRRLLRRRKYRNQKFYNLVKRTEVFGLSSREAIENRFRELSIKYPNIIELKTKALSQEVCPDEIAWILHDYLKNRGYFYDEKETKEDFDQQTVESMPSYKLNEFYKKYGYFKGALSQPTESEMKDNKDLKEAFFFDFSNKEWLKEINYFFNVQKNILSETFIEEFKKIFSFTRDISKGPGSDNMPSPYGIFGEFGDNGQGGRYEHIWDKNIGKCSIFTNEQRAPKYLPSALIFNFLNELANIRLYSTDKKNIQPLWKLSSVDKLNILLNLFNLPISEKKKKLTSTNINDIVKKESIKSIMLSVEDIDMIKYEWAGKEPNVYGVGLSGLNIEESAKENKFKFQDLKILNVLINLLDNVGIKFEFKDRNDIIKNLELLDNLYLFLIYQKESNNKDSSIDLFIAKNKSLNIENLKLKLKEFLLGAGNEFENHNSKTHSLSKKAIDAILPKLLDNNEGWNLEAIKNYDEEIKSQIEDNSSLMAKQDKKYLNDNFLKDAILPPNVKVTFQQAILIFNKIIQKFSKDFEIDKVVIELAREMTQDQENDALKGIAKAQKSKKSLVEERLEANNIDKSVFDDKYEKLIYKIFLWISQDFKDPYTGAKISANEIVNNKVEIDHIIPYSLCFDDSSANKVLVHKQSNQEKSNSLPYEYIKQGHSGWNWDEFTKYVKRVFVNNVDSILSKKERLKKSENLLTTSYDGYDKLGFLARNLNDTRYATILFRDQLNNYAEHHLIDNKKMFKVIAMNGAVTSFIRKNMSYDNKLRLKDRSDFSHHAYDAAIIALFSNKTKTLYNLIDPSLNGIISKRSEGYWVIEDRYTGEIKELKKEDWTSIKNNVQARKIAKEIEEYLIDLDDEVFFSRKTKRKTNRQLYNETIYGIAAKTDEDGITNYYKKEKFSILDDKDIYLRLLREREKFVINQSNPEVIDQIIEIIESYGKENNIPSRDEAINIKYTKNKINYNLYLKQYMRSLTKSLDQFSEEFINQMIANKTFVLYNPTKNTTRKIKFLRLVNDVKINDIRKNQVINKFNGKNNEPKAFYENINSLGAIVFKNSANNFKTLSINTQIAIFGDKNWDIEDFKTYNMEKIEKYKEIYGIDKTYNFHSFIFPGTILLDKQNKEFYYISSIQTVRDIIEIKFLNKIEFKDENKNQDTSKTPKRLMFGIKSIMNNYEQVDISPFGINKKIFE

SEQ ID NO: 328 - protein, 1233 aa, Mycoplasma canis
  Mycoplasma canis UFG4
MEKKRKVTLGFDLGIASVGWAIVDSETNQVYKLGSRLFDAPDTNLERRTQRGTRRLLRRRKYRNQKFYNLVKRTEVFGLSSREAIENRFRELSIKYPNIIELKTKALSQEVCPDEIAWILHDYLKNRGYFYDEKETKEDFDQQTIESMPSYKLNEFYKKYGYFKGALSQPTESEMKDNKDLKEAFFFDFSNKEWLKEINYFFNVQKNILSETFIEEFKKIFSFTRDISKGPGSDNMPSPYGIFGEFGDNGQGGRYEHIWDKNIGKCSIFTNEQRAPKYLPSALIFNFLNELANIRLYSTDKKNIQPLWKLSSIDKLNILLNLFNLPISEKKKKLTSANINDIVKKESTKSIMLSVEDIDMIKDEWAGKEPNVYGVGLSGLNIEESAKENKFKFQDLKILNVLINLLDNVGIKFEFKDRNDIIKNLELLDNLYLFLIYQKESNNKDSSIDLFIAKNESLNIENLKLKLKEFLLGAGNEFENHNSKTHSLSKKAIDAILPKLLDNNEGWNLEAIKNYDEEIKSQIEDNSFLMAKQDKKYLNDNFLKDAILPPNVKVTFQQAILIFNKIIQKFSKDFEIDKVVIELAREMTQDQENDALKGIAKAQKSKKSLVEERLEANNIDKSVFNEKYEKLIYKIFLWISQDFKDPYTGAKISANEIVDNKVEIDHIIPYSLCFDDSSANKVLVHKQSNQEKSNSLPYEYIKQGHSGWNWDEFTKYVKRVFVNNVDSILSKKERLKKSENLLTTSYDGYDKLGFLARNLNDTRYATILFRDQLNNYAEHHLIDDKKMFKVIAMNGAVTSFIRKNMSYDNKLRLKNRNDFSHHAYDAAIIALFSNKTKTLYNLIDPSLNGIISKRSEGYWVIEDRYTGEIKELKKEDWTSIKNNVQARKIAKEIEEYLIDLDDEVFFSRKTKRKTNRQLYNETIYGIAAKTDEDGITNYYKKEKLSILDDKDIYLRLLREREKFVINQSNPEVIDQIIEIIESYGKENNIPSRDEAINIKYTKNKINYNLYLKQYMRSLTKSLDQFSEEFINQMIANKTFVLYNPTKNTTRKIKFLRLVNDVKINDIRKNQVINKFNGKNNEPKAFYENINSLGAIVFKNSANNFKTLSINTQIAIFGDKNWDIEDFKTYNMEKIEKYKEIYGIDKTYNFHSFIFPGTILLDKQNKEFYYISSIQTVRDIIEIKFLNKIEFKDENKNQDTSKTPKRLMFGIKSIMNNYEQVDISPFGINKKIFE

SEQ ID NO: 329 - protein, 1239 aa, Mycoplasma cynos
MEEKRKVTLGFDLGVASVGWAIVDSETNEVYKLGSRLFDIPDTNIDRRAKRGSRRLVRRRSYRNQKFYNLIKRTKTFGFLDKEAIEKEFVLLSIKYPNIIELKVKGLQEEVSKSEAVWILHDYLKNRGYFYDDKEEKDDLENPSIESMPSYKLYEFYKEYGYFKGALSSPTESEKNKDSDLEKAIFFNFSNKEWTKEINHFFKIQKNIFSEDFKAKFMEFFSFIRDISKGPGSENMPSQYSIFGKYGDDGMGGKYQHIWDKNIGKCSIFKDKVRAPKYLPSALFFNLLNELSNIRLYSVDKREKSVLWRLSSKDKINIILNILQIILFKNDGKISNLDINKIVKNESIKSIILNEIDLDLIKDMWFEKEPNVYGIGLSGLNIEENKKENRFKFQDLKIFSVFIDLLKKSNINIEFNNEKDIIHNLKLLDELYFFLITQKYSRDKYGSIKKFILNNKSFNIDNLDEKLNIFLSISDDEFDNHNSKTHSLSKEAIYFIFPKLLHNNEGWNLEAIKNYDIDVREEISKHSFGIKKQDKKYLDDAFLDDAILPPSVKVTIKQSILIFNKIIKKFSNKFQIDNVVIELAREMTQEKEMDAQKSLNRLKKSRKKIIEERLNANNIDSKMFRDKTGEISPNYIYKIYLWISQNFKDPYTGENISANDILKNNVEIDHIIPYSLCFDDSSSNKVLVFKHSNQSKGNFLPFDMISTFSENSVWNWKEYTQYVEKTFKTNLESILDKKERVKKADNLLTSSYDGYDKLGFLARNLNDTRYATILFRDQLINYSENHLIDSKKMFKVIAMNGGVTSFIRKNMSFDSGLKVKDRSIFSHHAYDAAIIALFSNKTKILYNLINPSLDGIISKRSEGYWVLEDRLTGEIRKLNYNDWQSIKNNVEVKKIAREIESHLSNLDNVVMFSRKSKRKTNKELYNETLYGIATRIDENGIKNYYKKEKFNILEDENIYLRLLNERENFIINRSNPEVIDAIIEIFETIDKNKIPARDVAKNIKYTDNKIKYNLYLKDYMRKLVDEFPDKFRKDFIEQMIAKKIFILFNPIKNTTRKIKSLRSINNNKIEDIRKKQVLEKFNTAKNEPRSFYESLNSLGAIIFKNNLNIYKKMSISSQIATFGDKNWKIDDINTYNKEKLNKYKEIYGIDETYDFYSFIFPGTILLDEKNKEFLYISSIQTLKDKIELKFLDRIEFEKKNVNSNLKPKIKREIISTKKLMSDYKIIKISPLGINKKIFE

SEQ ID NO: 330 - protein, 1269 aa, Mycoplasma gallisepticum
MNNSIKSKPEVTIGLDLGVGSVGWAIVDNETNIIHHLGSRLFSQAKTAEDRRSFRGARRLIRRRKYKLKRFINLIWKYNSYFGFKNKEDILNNYQEQQKLHNTVLNLKLEALNAKIDPKALSWILHDYLKNRGHFYEDNRDFNVYPTEELANYFGEYGYYKGIIDSKEDNDDKLEEGLTKYKFSNQHWLEEIKKVLSNQTGLPEKFKEEYESLFSYVRNYSEGPGSINSVSPYGIYHLDEKEGKVVQKYNNIWDKTIGKCSIFPDEYRAPKNSPIAMIFNEINELSTIRSYSIYLTGWFINQEFKKAYLNKLLDLLIKTNSEKPIDARQFKKLREETIAESIGKETLKDVEREEKLEKEDHKWKLKGLKLNTNGKIQYNDLSSLAKFVHKLKQHLKLDFLLEDQYTTLDKINFLQSLFVYLGKHLRYSNRVDSANLKEFSDSNKLFERVLQEQKDDLFKLFEQTDKDDEKILAQTHSLSTKAMLLAITRMTNLDNDEDNQKNNDKGWNFEAIKNFDQKFIDITKKNNNLSLKQDKRYLDDRFINDAILSPGVKRILREATKVFNAILKQFSEEYDVTKVVIELARELSEEKELENTKNYEKLIKKNSDKISERLEALDIAEDKIEDILKSPTKSYKVLLWLQQDHIDPYSQKEIAFEDILTKTEKTEIDHIIPYSISFDDSSSNKLLVLAESNQAKSNQTPYEFITSGNAGIKWEDYEAYCRKFKDGDTSLLDSTQRSKKFAKMMKTDTSSKYDIGFLARNLNDTRYATIVFRDALKDYANNHLVEDKPMFKVVCINGGVTSFLRKNFDKSWYAKKDRDKNIHHAVDASIISIFSNETKTLFNQLTQFADYKLFKNTDGSWKKIDPKTGVVTEVTDENWKQIRVRNQVSEIAKVINKCIQDSNIERKARYSRKIENKTNISLFNDTVYSAKKVGYEDQIKRKNLKTLDIHESAEENKNSKVKKQFVYRKLVNVSLLNNDKLADLFAEKEDILMYRANPWVINLAEQIFNEYTENKKIKSQNVFEKYMLDLTKEFPEKFSEAFVKSMLRNKTAIIYNVEKKVVHRIKRLKILSSELKENKLSNVIIRSKNESGTKLSYQDTINSIALMIMRSIDPTAKKQYIRVPLNTLNLHLGDQDFDLHNIDAYLKKPKFVKYLKANEIGDEYKPWRVLTSGTLLIHKKDKKLMYISSFQNLKDVIEIKNLIETEYKENDDSDPKKKKKANRFLMTLSTILNDYILLDAKDNFDILGLSKNRIDEILNSKLGLDKITK

SEQ ID NO: 331 - protein, 1224 aa, Mycoplasma gallisepticum
MNNSIKSKPEVTIGLDLGVGSVGWAIVDNETNIIHHLGSRLFSQAKTAEDRRSFRGARRLIRRRKYKLKRFINLIWKYNSYFGFKNKEDILNNYQEQQKLHNTVLNLKLEALNAKIDPKALSWILHDYLKNRGHFYEDNRDFNVYPTEELANYFGEYGYYKGIIDSKEDNDDKLEEGLTKYKFSNQHWLEEIKKVLSNQTGLPEKFKEEYESLFSYVRNYSEGPGSINSVSPYGIYHLDEKEGKVVQKYNNIWDKTIGKCSIFPDEYRAPKNSPIAMIFNEINELSTIRSYSIYLTGWFINQEFKKAYLNKLLDLLIKTNSEKPIDARQFKKLREETIAESIGKETLKDVEREEKLEKEDHKWKLKGLKLNTNGKIQYNDLSSLAKFVHKLKQHLKLDFLLEDQYTTLDKINFLQSLFVYLGKHLRYSNRVDSANLKEFSDSNKLFERVLQEQKDDLFKLFEQTDKDDEKILAQTHSLSTKAMLLAITRMTNLDNDEDNQKNNDKGWNFEAIKNFDQKFIDITKKNNNLSLKQDKRYLDDRFINDAILSPGVKRILREATKVFNAILKQFSEEYDVTKVVIELARELSEEKELENTKNYEKLIKKNSDKISERLEALDIAEDKIEDILKSPTKSYKVLLWLQQDHIDPYSQKEIAFEDILTKTEKTEIDHIIPYSISFDDSSSNKLLVLAESNQAKSNQTPYEFITSGNAGIKWEDYEAYCRKFKDGDTSLLDSTQRSKKFAKMMKTDTSSKYDIGFLARNLNDTRYATIVFRDALKDYANNHLVEDKPMFKVVCINGGVTSFLRKNFDKSWYAKKDRDKNIHHAVDASIISIFSNETKTLFNQLTQFADYKLFKNTDGSWKKIDPKTGVVTEVTDENWKQIRVRNQVSEIAKVINKCIQDSNIERKARYSRKIENKTNISLFNDTVYSAKKVGYEDQIKRKNLKTLDIHESAEENKNSKVKKQFVYRKLVNVSLLNNDKLADLFAEKEDILMYRANPWVINLAEQIFNEYTENKKIKSQNVFEKYMLDLTKEFPEKFSEAFVKSMLRNKTAIIYNVEKKVVHRIKRLKILSSELKENKLSNVIIRSKNESGTKLSYQDTINSIALMIMRSIDPTAKKQYIRVPLNTLNLHLGDQDFDLHNIDAYLKKPKFVKYLKANEIGDEYKPWRVLTSGTLLIHKKDKKLMYISSFQNLKDVIEIKNLIETEYKENDDSDPKKRRKQIGS

SEQ ID NO: 332 - protein, 1269 aa, Mycoplasma gallisepticum
MNNSIKSKPEVTIGLDLGVGSVGWAIVDNETNIIHHLGSRLFSQAKTAEDRRSFRGVRRLIRRRKYKLKRFVNLIWKYNSYFGFKNKEDILNNYQEQQKLHNTVLNLKSEALNAKIDPKALSWILHDYLKNRGHFYEDNRDFNVYPTKELAKYFDKYGYYKGIIDSKEDNDNKLEEELTKYKFSNKHWLEEVKKVLSNQTGLPEKFKEEYESLFSYVRNYSEGPGSINSVSPYGIYHLDEKEGKVVQKYNNIWDKTIGKCNIFPDEYRAPKNSPIAMIFNEINELSTIRSYSIYLTGWFINQEFKKAYLNKLLDLLIKTNGEKPIDARQFKKLREETIAESIGKETLKDVENEEKLEKEDHKWKLKGLKLNTNGKIQYNDLSSLAKFVHKLKQHLKLDFLLEDQYATLDKINFLQSLFVYLGKHLRYSNRVDSANLKEFSDSNKLFERILQKQKDGLFKLFEQTDKDDEKILAQTHSLSTKAMLLAITRMTNLDNDEDNQKNNDKGWNFEAIKNFDQKFIDITKKNNNLSLKQNKRYLDDRFINDAILSPGVKRILREATKVFNAILKQFSEEYDVTKVVIELARELSEEKELENTKNYKKLIKKNGDKISEGLKALGISEDEIKDILKSPTKSYKFLLWLQQDHIDPYSLKEIAFDDIFTKTEKFEIDHIIPYSISFDDSSSNKLLVLAESNQAKSNQTPYEFISSGNAGIKWEDYEAYCRKFKDGDSSLLDSTQRSKKFAKMMKTDTSSKYDIGFLARNLNDTRYATIVFRDALEDYANNHLVEDKPMFKVVCINGSVTSFLRKNFDDSSYAKKDRDKNIHHAVDASIISIFSNETKTLFNQLTQFADYKLFKNTDGSWKKIDPKTGVVTEVTDENWKQIRVRNQVSEIAKVIEKYIQDSNIERKARYSRKIENKTNISLFNDTVYSAKKVGYEDQIKRKNLKTLDIHESAKENKNSKVKRQFVYRKLVNVSLLNNDKLADLFAEKEDILMYRANPWVINLAEQIFNEYTENKKIKSQNVFEKYMLDLTKEFPEKFSEFLVKSMLRNKTAIIYDDKKNIVHRIKRLKMLSSELKENKLSNVIIRSKNQSGTKLSYQDTINSLALMIMRSIDPTAKKQYIRVPLNTLNLHLGDHDFDLHNMDAYLKKPKFVKYLKANEIGDEYKPWRVLTSGTLLIHKKDKKLMYISSFQNLNDVIEIKNLIETEYKENDDSDSKKKKKANRFLMTLSTILNDYILLDAKDNFDILGLSKNRIDEILNSKLGLDKIVK

SEQ ID NO: 333 - protein, 1269 aa, Mycoplasma gallisepticum; identical to SEQ ID NO: 332
  Mycoplasma gallisepticum str. F

SEQ ID NO: 334 - protein, 1270 aa, Mycoplasma gallisepticum
MNNSIKSKPEVTIGLDLGVGSVGWAIVDNETNIIHHLGSRLFSQAKTAEDRRSFRGVRRLIRRRKYKLKRFVNLIWKYNSYFGFKNKEDILNNYQEQQKLHNTVLNLKLEALNAKIDPKALSWILHDYLKNRGHFYEDNRDFNVYPTEELANYFDEFGYYKGIIDSKNDDDDKLEEGLTKYKFSNQHWLEEVKKVLSNQTGLPEKFKEEYESLFSYVRNYSEGPGSINSVSPYGIYHLDEKEGKVVQKYNNIWDKTIGKCSIFPDEYRAPKNSPIAMIFNEINELSTIRSYSIYLTGWFINQEFKKAYLNKLLDLLIKTNSEKPIDARQFKKLREETIAESIGKETLKDVESEEKLEKDDHKWKLKGLKLNTNGKIQYNDLSSLAKFVHKLKQHLKLDFLLEDQYTPLDKINFLQSLYVYLGKHLRYSNRVDSANLKEFSDSSRLFERVLQEQKDGLFKLFEQTDKDDEKILTQTHSLSTKAMLLAITRMTNLDNDEDNQKNNDKGWNFEAIKNFDQKFIDITKTNNNLSLKQDKRYLDDQFINDAILSPGVKRILREATKVFNAILKQFSEEYDVTKVVIELARELSEEKELENTKNYKKLIKKNGDKISEGLKALGIAEDKIEEILKSPTKSYKVLLWLQQDHIDPYSQKEIAFDDILTKTEKTEIDHIIPYSISFDDSSSNKLLVLAESNQAKSNQTPYEFINSGKAEITWEVYEAYCHKFKNGDSSLLDSTQRSKKFAKMMKTDTSSKYDIGFLARNLNDTRYATIVFRDALKDYANNHLVEDKPMFKVVCINGGVTSFLRKNFDPKSWYAKKDRDKNIHHAVDASIISIFSNETKTLFNQLTKFADYKLFKNTDGSWKKIDPKTGVVSEVTDENWKQIRVRNQVSEIAKVIDKYIQDSNIERKARYSRKIENKTNISLFNDTVYSAKKVGYEDQIKRKNLKTLDIHESAEENKNSKVKKQFVYRKLVNVSLLNNDKLADLFAEKEDILMYRANPWVINLAEQIFNEYTENKKIKSQNVFEKYMLDLTKEFPEKFSEAFVKSMIRNKTAIIYNVEKDVVHRIKRLKILSSELKENKWSNVIIRSKNESGTKLSYQDTINSIALMIMRSIDPTAKKQYIRVPLNTLNLHLGDQDFDLHNIDAYLKKPKFVKYLKANEIGDEYKPWRVLTSGTLLIHKKDKKLMYISSFQNLNDLIEIKNLIETEYKENVDSDPKKKKKASQILRSLSVILNDYILLDAKYNFDILGLSKNKIDEILNSKLDLDKIAK

SEQ ID NO: 335 - protein, 1236 aa, Mycoplasma mobile
MYFYKNKENKLNKKVVLGLDLGIASVGWCLTDISQKEDNKFPIILHGVRLFETVDDSDDKLLNETRRKKRGQRRRNRRLFTRKRDFIKYLIDNNIIELEFDKNPKILVRNFIEKYINPFSKNLELKYKSVTNLPIGFHNLRKAAINEKYKLDKSELIVLLYFYLSLRGAFFDNPEDTKSKEMNKNEIEIFDKNESIKNAEFPIDKIIEFYKISGKIRSTINLKFGHQDYLKEIKQVFEKQNIDFMNYEKFAMEEKSFFSRIRNYSEGPGNEKSFSKYGLYANENGNPELIINEKGQKIYTKIFKTLWESKIGKCSYDKKLYRAPKNSFSAKVFDITNKLTDWKHKNEYISERLKRKILLSRFLNKDSKSAVEKILKEENIKFENLSEIAYNKDDNKINLPIINAYHSLTTIFKKHLINFENYLISNENDLSKLMSFYKQQSEKLFVPNEKGSYEINQNNNVLHIFDAISNILNKFSTIQDRIRILEGYFEFSNLKKDVKSSEIYSEIAKLREFSGTSSLSFGAYYKFIPNLISEGSKNYSTISYEEKALQNQKNNFSHSNLFEKTWVEDLIASPTVKRSLRQTMNLLKEIFKYSEKNNLEIEKIVVEVTRSSNNKHERKKIEGINKYRKEKYEELKKVYDLPNENTTLLKKLWLLRQQQGYDAYSLRKIEANDVINKPWNYDIDHIVPRSISFDDSFSNLVIVNKLDNAKKSNDLSAKQFIEKIYGIEKLKEAKENWGNWYLRNANGKAFNDKGKFIKLYTIDNLDEFDNSDFINRNLSDTSYITNALVNHLTFSNSKYKYSVVSVNGKQTSNLRNQIAFVGIKNNKETEREWKRPEGFKSINSNDFLIREEGKNDVKDDVLIKDRSFNGHHAEDAYFITIISQYFRSFKRIERLNVNYRKETRELDDLEKNNIKFKEKASFDNFLLINALDELNEKLNQMRFSRMVITKKNTQLFNETLYSGKYDKGKNTIKKVEKLNLLDNRTDKIKKIEEFFDEDKLKENELTKLHIFNHDKNLYETLKIIWNEVKIEIKNKNLNEKNYFKYFVNKKLQEGKISFNEWVPILDNDFKIIRKIRYIKFSSEEKETDEIIFSQSNFLKIDQRQNFSFHNTLYWVQIWVYKNQKDQYCFISIDARNSKFEKDEIKINYEKLKTQKEKLQIINEEPILKINKGDLFENEEKELFYIVGRDEKPQKLEIKYILGKKIKDQKQIQKPVKKYFPNWKKVNLTYMGEIFKK

SEQ ID NO: 336 - protein, 1265 aa, Mycoplasma ovipneumoniae
  Mycoplasma ovipneumoniae SC01
MHNKKNITIGFDLGIASIGWAIIDSTTSKILDWGTRTFEERKTANERRAFRSTRRNIRRKAYRNQRFINLILKYKDLFELKNISDIQRANKKDTENYEKIISFFTEIYKKCAAKHSNILEVKVKALDSKIEKLDLIWILHDYLENRGFFYDLEEENVADKYEGIEHPSILLYDFFKKNGFFKSNSSIPKDLGGYSFSNLQWVNEIKKLFEVQEINPEFSEKFLNLFTSVRDYAKGPGSEHSASEYGIFQKDEKGKVFKKYDNIWDKTIGKCSFFVEENRSPVNYPSYEIFNLLNQLINLSTDLKTTNKKIWQLSSNDRNELLDELLKVKEKAKIISISLKKNEIKKIILKDFGFEKSDIDDQDTIEGRKIIKEEPTTKLEVTKHLLATIYSHSSDSNWININNILEFLPYLDAICIILDREKSRGQDEVLKKLTEKNIFEVLKIDREKQLDFVKSIFSNTKFNFKKIGNFSLKAIREFLPKMFEQNKNSEYLKWKDEEIRRKWEEQKSKLGKTDKKTKYLNPRIFQDEIISPGTKNTFEQAVLVLNQIIKKYSKENIIDAIIIESPREKNDKKTIEEIKKRNKKGKGKTLEKLFQILNLENKGYKLSDLETKPAKLLDRLRFYHQQDGIDLYTLDKINIDQLINGSQKYEIEHIIPYSMSYDNSQANKILTEKAENLKKGKLIASEYIKRNGDEFYNKYYEKAKELFINKYKKNKKLDSYVDLDEDSAKNRFRFLTLQDYDEFQVEFLARNLNDTRYSTKLFYHALVEHFENNEFFTYIDENSSKHKVKISTIKGHVTKYFRAKPVQKNNGPNENLNNNKPEKIEKNRENNEHHAVDAAIVAIIGNKNPQIANLLTLADNKTDKKFLLHDENYKENIETGELVKIPKFEVDKLAKVEDLKKIIQEKYEEAKKHTAIKFSRKTRTILNGGLSDETLYGFKYDEKEDKYFKIIKKKLVTSKNEELKKYFENPFGKKADGKSEYTVLMAQSHLSEFNKLKEIFEKYNGFSNKTGNAFVEYMNDLALKEPTLKAEIESAKSVEKLLYYNFKPSDQFTYHDNINNKSFKRFYKNIRIIEYKSIPIKFKILSKHDGGKSFKDTLFSLYSLVYKVYENGKESYKSIPVTSQMRNFGIDEFDFLDENLYNKEKLDIYKSDFAKPIPVNCKPVFVLKKGSILKKKSLDIDDFKETKETEEGNYYFISTISKRFNRDTAYGLKPLKLSVVKPVAEPSTNPIFKEYIPIHLDELGNEYPVKIKEHTDDEKLMCTIK

SEQ ID NO: 337 - protein, 1314 aa, Mycoplasma synoviae
MLRLYCANNLVLNNVQNLWKYLLLLIFDKKIIFLFKIKVILIRRYMENNNKEKIVIGFDLGVASVGWSIVNAETKEVIDLGVRLFSEPEKADYRRAKRTTRRLLRRKKFKREKFHKLILKNAEIFGLQSRNEILNVYKDQSSKYRNILKLKINALKEEIKPSELVWILRDYLQNRGYFYKNEKLTDEFVSNSFPSKKLHEHYEKYGFFRGSVKLDNKLDNKKDKAKEKDEEEESDAKKESEELIFSNKQWINEIVKVFENQSYLTESFKEEYLKLFNYVRPFNKGPGSKNSRTAYGVFSTDIDPETNKFKDYSNIWDKTIGKCSLFEEEIRAPKNLPSALIFNLQNEICTIKNEFTEFKNWWLNAEQKSEILKFVFTELFNWKDKKYSDKKFNKNLQDKIKKYLLNFALENFNLNEEILKNRDLENDTVLGLKGVKYYEKSNATADAALEFSSLKPLYVFIKFLKEKKLDLNYLLGLENTEILYFLDSIYLAISYSSDLKERNEWFKKLLKELYPKIKNNNLEIIENVEDIFEITDQEKFESFSKTHSLSREAFNHIIPLLLSNNEGKNYESLKHSNEELKKRTEKAELKAQQNQKYLKDNFLKEALVPLSVKTSVLQAIKIFNQIIKNFGKKYEISQVVIEMARELTKPNLEKLLNNATNSNIKILKEKLDQTEKFDDFTKKKFIDKIENSVVFRNKLFLWFEQDRKDPYTQLDIKINEIEDETEIDHVIPYSKSADDSWFNKLLVKKSTNQLKKNKTVWEYYQNESDPEAKWNKFVAWAKRIYLVQKSDKESKDNSEKNSIFKNKKPNLKFKNITKKLFDPYKDLGFLARNLNDTRYATKVFRDQLNNYSKHHSKDDENKLFKVVCMNGSITSFLRKSMWRKNEEQVYRFNFWKKDRDQFFHHAVDASIIAIFSLLTKTLYNKLRVYESYDVQRREDGVYLINKETGEVKKADKDYWKDQHNFLKIRENAIEIKNVLNNVDFQNQVRYSRKANTKLNTQLFNETLYGVKEFENNFYKLEKVNLFSRKDLRKFILEDLNEESEKNKKNENGSRKRILTEKYIVDEILQILENEEFKDSKSDINALNKYMDSLPSKFSEFFSQDFINKCKKENSLILTFDAIKHNDPKKVIKIKNLKFFREDATLKNKQAVHKDSKNQIKSFYESYKCVGFIWLKNKNDLEESIFVPINSRVIHFGDKDKDIFDFDSYNKEKLLNEINLKRPENKKFNSINEIEFVKFVKPGALLLNFENQQIYYISTLESSSLRAKIKLLNKMDKGKAVSMKKITNPDEYKIIEHVNPLGINLNWTKKLENNN

SEQ ID NO: 338 - protein, 1304 aa, Mycoplasma synoviae
  Mycoplasma synoviae 53
MLNNVQNLWKYLLLLIFDKKIIFLFKIKVILIRRYMENNNKEKIVIGFDLGVASVGWSIVNAETKEVIDLGVRLFSEPEKADYRRAKRTTRRLLRRKKFKREKFHKLILKNAEIFGLQSRNEILNVYKDQSSKYRNILKLKINALKEEIKPSELVWILRDYLQNRGYFYKNEKLTDEFVSNSFPSKKLHEHYEKYGFFRGSVKLDNKLDNKKDKAKEKDEEEESDAKKESEELIFSNKQWINEIVKVFENQSYLTESFKEEYLKLFNYVRPFNKGPGSKNSRTAYGVFSTDIDPETNKFKDYSNIWDKTIGKCSLFEEEIRAPKNLPSALIFNLQNEICTIKNEFTEFKNWWLNAEQKSEILKFVFTELFNWKDKKYSDKKFNKNLQDKIKKYLLNFALENFNLNEEILKNRDLENDTVLGLKGVKYYEKSNATADAALEFSSLKPLYVFIKFLKEKKLDLNYLLGLENTEILYFLDSIYLAISYSSDLKERNEWFKKLLKELYPKIKNNNLEIIENVEDIFEITDQEKFESFSKTHSLSREAFNHIIPLLLSNNEGKNYESLKHSNEELKKRTEKAELKAQQNQKYLKDNFLKEALVPLSVKTSVLQAIKIFNQIIKNFGKKYEISQVVIEMARELTKPNLEKLLNNATNSNIKILKEKLDQTEKFDDFTKKKFIDKIENSVVFRNKLFLWFEQDRKDPYTQLDIKINEIEDETEIDHVIPYSKSADDSWFNKLLVKKSTNQLKKNKTVWEYYQNESDPEAKWNKFVAWAKRIYLVQKSDKESKDNSEKNSIFKNKKPNLKFKNITKKLFDPYKDLGFLARNLNDTRYATKVFRDQLNNYSKHHSKDDENKLFKVVCMNGSITSFLRKSMWRKNEEQVYRFNFWKKDRDQFFHHAVDASIIAIFSLLTKTLYNKLRVYESYDVQRREDGVYLINKETGEVKKADKDYWKDQHNFLKIRENAIEIKNVLNNVDFQNQVRYSRKANTKLNTQLFNETLYGVKEFENNFYKLEKVNLFSRKDLRKFILEDLNEESEKNKKNENGSRKRILTEKYIVDEILQILENEEFKDSKSDINALNKYMDSLPSKFSEFFSQDFINKCKKENSLILTFDAIKHNDPKKVIKIKNLKFFREDATLKNKQAVHKDSKNQIKSFYESYKCVGFIWLKNKNDLEESIFVPINSRVIHFGDKDKDIFDFDSYNKEKLLNEINLKRPENKKFNSINEIEFVKFVKPGALLLNFENQQIYYISTLESSSLRAKIKLLNKMDKGKAVSMKKITNPDEYKIIEHVNPLGINLNWTKKLENNN

SEQ ID NO: 339 - protein, 1401 aa, Myroides injenensis
  Myroides injenensis M09-0166
MKRILGLDLGTTSIGWAYVHEAENVNETSSIQKVGVRVNPLTTEEQTNFEKGKPITTNASRTLARSARRNLQRYKLRRDNLIQILKENNWINNTTSLTETGNHSTFETYELRNKAASEKLTLDQLSRVLLMLNKKRGYKSSRKVNSKEEGQLIDGMEVAKKLYHEQLTPGQLSLQLMNQGVKKLPDYYRSDLNQELESIWNFQQQFYPNILTDKFKEEINGKGLTSTSSAFWNIYNFNTAENKGSRDEKKKQALQWRSEALSKQLSKEIVAYIIADLNGQIYNSSGYLGAISDRSKELYFNNLTVGQYLFKQLKSNPHTSLKNQVFYRQDYLNEFEKIWETQSKFYPKELTAALKREIRDVIIFYQRKLKSQKGLISFCEFEQKQKTINGKTKTIGHRVIPKSSPLFQEFKIWQQLHNVVLRNKKTNEIVSLADEQKVHLFEELNLKGKLKSNQVLKLIENKPKDWELNYTELEGNNTNKALYNAYLDILDIEGYDVRNELKVKLNKDDIELSDLDVNASEIKEMIFSVFKHLGINTEILEFDATLEDKVFEKQASYQLWHLLYSYEEDNSPTGLDRLYNLLHKKFGFKLNHAKLIGNVLFQDDYGSLSSKAIKNIFPYITENNYYTACELAGYKHSKHSLTKEENETRELKNRLTILPKNSLRNPVVEKIINQMINVVNTLIDEENNILIAQGKEPNFQFDEIRIELARELKKNAKEREELTKSINKSKTDHEKIIKILQKEDGIKNPTRNDIVRFKLYSELKNNGYKDLYTNEYIERKDIFTKEYDIEHIIPQSKLFDDSFSNKTLVRRNVNLKKGNQTAYDFILCEYGQEKANEFETRITNLYNLGKDEGISKSKFKKLLMQESEIGNGFIERDLRETQYIAKKAKSLLLEITRNVISTSGSITDRLREDWGLINVMKELNLQKYRDAGLTEFVKMKDGNKKEVIIDWTKRNDHRHHAMDALTIAFTKHNHIQYLNHLNARKNVNNELHNNIIAIEKLETTLVSDERGNKKRIFKEPIANFRTIAKSHLEAILVSHKAKNKVVTKNINKISGKKISQQTLTPRGQLHKETIYGKIRQYVSKQEKVGPKFTIEVIEQVSNPTYRNLLLKRLEENNNDPKKAFGGKNSLNKNPIYINLEKNIKVPEVLKLVWLEDNYTIRKEISPDLKIDKVIDQGVKQILQNRLAQYKGDSKLAFSNLDANPIWLNEDKGIAIKRVTISGIATAQPLHRKKDHLGQPILDHNGQEIPVDFISTGNNHHVAIYEDENGKLQESVVSHFEAVERVNQKLPIIDKTFNQHLGWKFLFTMKQNELFLFPSDDFNPNEIDLFDKQNYTVISKHLFRIQKLSTKDYSFRHHLETNVEEIKDLKTITWRREGLNGIQNIIKVRTNHLGEIIHIGEY

SEQ ID NO: 340 - protein, 1466 aa, Myroides odoratus
  Myroides odoratus DSM 2801
MKNILGLDLGTNSIGWALVKEDFENKQGEILGLGSRIIPMSQDILGEFGRGNSISQTADRTGYRGVRRLRERHLLRRERLHRVLNILGFLPNHYAKEIDFTKRLGKFINHAEPKLSFDKEFIFKDSFNEMLKDFQQNQPGFIINKHGEEALVPYDWTIYYLRKKALTQKIDKEELAWILLNFNQKRGYYQLRGEEEEENTNKLVEFYSLKIIDVIADNEVNKKGEVWYSLHLENGWIYRRSSKISLVDWKDKVRDFIVTTDVNDDGSEKLDKDGVVKRSFRAPSADDWTLLKKKTEQDIDNSNKTVGAYIYENLLLNPKQKIKGKLVRTIERKFYKDELKQILEKQKEFHQELQNEQLLQDCVRELYKYNEQHQQMLESKDFVHLFLNDIIFYQRPLRSQKSLISNCTLEKRVSRDGVVFPIKVISKSNPYYQEFRLLQWLQNLAIYRKDDDVNVTQEFLNSIESWENLLQFLNAKKEIKQEQLIKFLLEQKGLKGNSLKTAILTYRWNYVTDKVYPMNETRSLIQDKLKKVENVATDFLSFDNEMALWHIIYSVNDKIEYEKALAKFASKHNLDEISFVESFKKFPPFKSDYGSFSEKAIKKLLPLMRFGSVWNKNNIVPSVLDRIDKILTGEYDEKIKIRVREKAEQFQLNQIEDFQNLPLWLAQYVVYDRHSEAEIAGKWNSVKDLENYLKEFKQHSLRNPIVEQIITETLRVVKDIWQQYGNGVQNFFDEIHIELGREMKNTADERKRITNSVTENENTNLRIKALLVELKEDTNIENVRPHSPMQQEILKIYEEGVLNAVENIDEDILKISKTAQPSKSELIRYKLWLEQKYQSPYTGEMIPLSRLFTSDYEIEHVIPQSRYFDDSLSNKVICEAAVNKRKDNQLGLEFIKNHHSEKIELGNGRTAQVLEVEAYESFVKKNYDKNRGKRNKLLLEDVPEKMIERQLNDTRYISKFVTHLLSNIVRKDEVNSKDDGINSKNIIPGNGKITSQLKQDWGLNDVWNELILPRFERMNNLTNSTDFTSTNTNGKIIPTVPLEYSKGFSKKRIDHRHHALDALVIALATRDHVNLLNNESALPKKDRTKEEQKSFRFDLQVNLRNKEKYFNVKEGREKEKFTTFKKPWNTLTQDTRDALENMVVSFKQNLRVINKATNYYESYTDENGNLRLDKYGNPKKELISQKGTNWAIRKSLHKETVSGQIHLDRVKVTKGKIVTATRKSLDSSFNEKSIESITDTGIQKILRNYLKAKDNKPDVAFSPEGIEELNKSISVYNEGKNHQPIIKVRIFEQGSKFPVGETGNKIAKFVEAAKGTNLFFGIYQDKTGKRSYDTIPLNLVIERLKQGLSPVPETNEKGHQLLFHLSPNDLVYVPTIDDNEQLDSNRVYKFTDSSDTTCNFIPSNISAIIFNINSKEQEKRGINYPIQNELGVGSPQSKNQKSFDGFMIKEVCIKLKVDRLGNISKT

SEQ ID NO: 341 - protein, 1077 aa, Neisseria bacilliformis
  Neisseria bacilliformis ATCC BAA-1200
MQQKPQRYILGLDLGIASVGWACVWADENEHPTGLLDCGVRTFERAEVPKTGDSLALARRQARSVRRLIRRRAHRLLRLRRLLKREGVLLSADFNENGLVRGLPIDAWALRVAGLDRKLSNKEWAAVLLHLVKHRGYLSQRKNETQSKDKELGRLLAGVNGNREALQNRSDEYRTAAELAVKKFAAENNGSLRNKGGDYSHTFDRKDLQRELHLLFERQRALDNPFTSSEMEAAVDELLMKQRSALQGEAVLKMLGRCTFEPSEYKAAKNTYSAERFVWLTKLNNLRIQYNGEERALSEAERRLLLDEPYQKAKLTYKQVRTILELPESAVFKGLRYGHGEDGLKAESGTLMEMKAYHAVRKALKDAGLEGEWENRIRNPELLDAIGTAFSLYKTDEDIRANLAAFRLSENVLEALLAGLNFDKFVHLSLKALAKILPLMEQGMRYDEACKEAYGDHYGAKEQEDHRLLPPFVADDIRNPVVFRTLTQARKIVNEIVRRYGSPLRVHIETGREVGKSFSDRKEIEKRQEENRKERERAAAHFKELFPNFAGEPKAQDILKLRLYEQQHGKCLYSGKEIDLRRLPEKGYVEIDHALPFSRTWDDSFNNKVLVLGKENQDKRNRTPYEYLDGKGNSGAWRAFAERVSGCRFPYAKKQRLLTQKLDEKTEQGFLERNLNDTRYVARFLCQFIEEKMHLEGAGKKRVFASNGQITALLRGFWGLKKVREENDRHHALDAVVVACSSVSMQQKITRHFRYREELEHIDRETGEVIHGFPQPWEFFRQEVMTRVFSDDPVSELAEKLDSRPEAVHEFVTPLFVSRAPHRKVTGQGHLETIRSAKRLDEKISVVKLPLTQLKTKDIERIVGYPNREPALYDALAARLAAFKDDPAKAFSEPFYKTGKDGKCGVLVKAVRVENVQKSGLLVRKDESGKMQGVADNATMVRVDVFGKNGKNYLVPVYAWQVEKGELPNRAVVAYADEEDWDEMDDSFEFKFSLYPNDLVEVVTKKDKFFGYYSGFNRATGAINIKEHDLSKSKVKNGVYEGIGVKTAQSFQKYQVDTLGKTIRLCKPEKRMGFKKK

SEQ ID NO: 342 - protein, 1082 aa, Neisseria cinerea
  Neisseria cinerea ATCC 14685
MAAFKPNPMNYILGLDIGIASVGWAIVEIDEEENPIRLIDLGVRVFERAEVPKTGDSLAAARRLARSVRRLTRRRAHRLLRARRLLKREGVLQAADFDENGLIKSLPNTPWQLRAAALDRKLTPLEWSAVLLHLIKHRGYLSQRKNEGETADKELGALLKGVADNTHALQTGDFRTPAELALNKFEKESGHIRNQRGDYSHTFNRKDLQAELNLLFEKQKEFGNPHVSDGLKEGIETLLMTQRPALSGDAVQKMLGHCTFEPTEPKAAKNTYTAERFVWLTKLNNLRILEQGSERPLTDTERATLMDEPYRKSKLTYAQARKLLDLDDTAFFKGLRYGKDNAEASTLMEMKAYHAISRALEKEGLKDKKSPLNLSPELQDEIGTAFSLFKTDEDITGRLKDRVQPEILEALLKHISFDKFVQISLKALRRIVPLMEQGNRYDEACTEIYGDHYGKKNTEEKIYLPPIPADEIRNPVVLRALSQARKVINGVVRRYGSPARIHIETAREVGKSFKDRKEIEKRQEENRKDREKSAAKFREYFPNFVGEPKSKDILKLRLYEQQHGKCLYSGKEINLGRLNEKGYVEIDHALPFSRTWDDSFNNKVLALGSENQNKGNQTPYEYFNGKDNSREWQEFKARVETSRFPRSKKQRILLQKFDEDGFKERNLNDTRYINRFLCQFVADHMLLTGKGKRRVFASNGQITNLLRGFWGLRKVRAENDRHHALDAVVVACSTIAMQQKITRFVRYKEMNAFDGKTIDKETGEVLHQKAHFPQPWEFFAQEVMIRVFGKPDGKPEFEEADTPEKLRTLLAEKLSSRPEAVHKYVTPLFISRAPNRKMSGQGHMETVKSAKRLDEGISVLRVPLTQLKLKDLEKMVNREREPKLYEALKARLEAHKDDPAKAFAEPFYKYDKAGNRTQQVKAVRVEQVQKTGVWVHNHNGIADNATIVRVDVFEKGGKYYLVPIYSWQVAKGILPDRAVVQGKDEEDWTVMDDSFEFKFVLYANDLIKLTAKKNEFLGYFVSLNRATGAIDIRTHDTDSTKGKNGIFQSVGVKTALSFQKYQIDELGKEIRPCRLKKRPPVR

SEQ ID NO: 343 - protein, 1081 aa, Neisseria flavescens
  Neisseria flavescens SK114
MTAFKPNPINYILGLDIGIASVGWAMVEIDEEENPIRLIDLGVRVFERAEVPKTGDSLAAARRLARSVRRLTRRRAHRLLRARRLLKREGVLQAADFDENGLIKSLPNTPWQLRAAALDRKLTPLEWSAVLLHLIKHRGYLSQRKNEGETADKELGALLKGVADNAHALQTGDFRTPAELAVNKFEKESGHIRNQRGDYSHTFSRKDLQAELVLLFEKQKEFGNPHISDGLKEGIETLLMAQRPALSGDAVQKMLGYCTFEPTEPKAAKNTYTAERFIWLTKLNNLRILEQGSERPLTDTERATLIDMPYKNKLTYAKARELLGLDDTAFFKGLRYGKDNAESATLMEMKAYHAIRRALEKEGLKDKKSPLSLSPELQDEIGTAFSLFKTDEDITGRLKGCLQPEILDALLKHINFDKFVQISLKALRRIVPLMEQGKRYDEACAETYGDHYGEKNSEEMLYLPPIPADEIRNPVVLRALSQARKVINGVVRRYGSPARIHIETAREVGKSFKDRKEIEKRQEENRKDREKAAAKFREYFPNFVGEPKSKDILKLRLYEQQHGKCLYSGKAIDIRRLNGKGYVEIDHALPFSRTWDDSFNNKVLVLGSENQNKGNRTPYEYLNGKDNSREWLEFKARVETSRFPHSKKQRVLLQKFDEKGFKERNLNDTRYVNRFLCQFVADHMQLTGKGKRRVFASNGQITNLLRGFWGLHKVRAENDRHHALDAVVVACSTVAMQQKITCFVRYKEMNAFDGKTVDKETGEVLHQKTHFPQPWEFFAQEVMIRVFGKPDGKPEFEEADTPEKLRALLAEKLSSRPEAVHEYVTPLFVSRAPNRKMSGAHKDTLRSAKRFVKHNEKISVKRVWLTEIKLADLENMVNYKNGREIELYEALKARLGAYGGNAKQAFDPKDNPFYKKGGQLVKAVRVEKTQESGVLLNKKNAYTIADNGDMVRVDVFCKVDKKGKNQYFIVPIYAWQVAENILPDIDCKGYRIDDSYTFCFSLHKYDLIAFQKDEKSKVEFAYYINCDSSNGRFYLAWHDKGSKEQQFRISTQNLVLMQKYQIDELGKEIRPCRLKKRPPVR

SEQ ID NO: 344 - protein, 1082 aa, Neisseria lactamica
MAAFKPNPMNYILGLDIGIASVGWAMVEIDKEENPIRLIDLGVRVFERAEVPKTGDSLAMARRLARSVRRLTRRRAHRLLRARRLLKREGVLQDADFDENGLVKSLPNTPWQLRAAALDRKLTCLEWSAVLLHLIKHRGYLSQRKNEGETADKELGALLKGVADNAHALQTGDFRTPAELALNKFEKESGHIRNQRGDYSHTFSRKDLQAELNLLFEKQKEFSNPHVSDSLKEGIETLLMAQRPALSGDAVQKMLGHCTFEPAEPKAAKNTYTAERFIWLTKLNNLRILEQGSERPLTDTERATLMDEPYRKSKLTYAQARKLLGLEDTAFFKGLRYGKDNAEAPTLMEMKAYHAISRALEKEGLKDKKSPLNLSTELQDEIGTAFSLFKTDKDITGRLKDRVQPEILEALLKHISFDKFVQISLKALRRIVPLMEQGKRYDEACAEIYGDHYCKKNAEEKIYLPPIPADEIRNPVVLRALSQARKVINCVVRRYGSPARIHIETAREVGKSFKDRKEIEKRQEENRKDREKAAAKFREYFPNFVGEPKSKDILKLRLYEQQHGKCLYSGKEINLVRLNEKGYVEIDHALPFSRTWDDSFNNKVLVLGSENQNKGNQTPYEYFNGKDNSREWQEFKARVETSRFPRSKKQRILLQKFDEEGFKERNLNDTRYVNRFLCQFVADHILLTGKGKRRVFASNGQITNLLRGFWGLRKVRAENDRHHALDAVVVACSTVAMQQKITRFVRYKEMNAFDGKTIDKETGEVLHQKAHFPQPWEFFAQEVMIRVFGKPDGKPEFEEADTPEKLRTLLAEKLSSRPEAVHEYVTPLFVSRAPNRKMSGQGHMETVKSAKRLDEGISVLRVPLTQLKLKGLEKMVNREREPKLYDALKAQLETHKDNPAKAFAEPFYKYDKAGNRTQQVKAVRIEQVQKTGVWVRNHNGIADNATMVRVDVFEKGGKYYLVPIYSWQVAKGILPDRAVVAFKDEEDWTVMDDSFEFRFVLYANDLIKLTAKKNEFLGYFVSLNRATGAIDIRTHDTDSTKGKNGIFQSVGVKTALSFQKNQIDELGKEIRPCRLKKRPPVR

SEQ ID NO: 345 - protein, 1082 aa, Neisseria meningitidis
MAAFKPNPINYILGLDIGIASVGWAMVEIDEDENPICLIDLGVRVFERAEVPKTGDSLAMARRLARSVRRLTRRRAHRLLRARRLLKREGVLQAADFDENGLIKSLPNTPWQLRAAALDRKLTPLEWSAVLLHLIKHRGYLSQRKNEGETADKELGALLKGVADNAHALQTGDFRTPAELALNKFEKESGHIRNQRGDYSHTFSRKDLQAELNLLFEKQKEFGNPHISDGLKEGIETLLMTQRPALSGDAVQKMLGHCTFEPAEPKAAKNTYTAERFIWLTKLNNLRILEQGSERPLTDTERTTLIDEPYRKSKLTYAQARKLLELDNTAFFKGLRYGKDNAEASTLMEMKAYHAISRALEKEGLKDKKSPLNLSPELQDEIGTAFSLFKTDEDITGRLKDRVQPEILEALLKHISFDKFVQISLKALRRIVPLMEQGKRYDEACAEIYGDHYGKKNTEEKIDLPPIPADEIRNPVVLRALSQARKVINGVVRRYGSPARIHIETAREVGKSFKDRKEIEKRQEENRKDREKAATKFREYFPNFVGEPKSKDILKLRLYEQQHGKCLYSGKEINLGRLNEKGYVEIDHALPFSRTWDDSFNNKVLVLGSENQNKGNQTPYEYFNGKDNSREWQEFKARVETSRFPRSKKQRILLQKFDEEGFKERNLNDTRYVNRFLCQFVADHMLLTGKGKRRVFASNGQITNLLRGFWGLRKVRAENDRHHALDAVVVACSTVAMQQKITRFVRYKEMNAFDGKTIDKETGEVLHQKTHFPQPWEFFAQEVMIRVFGKPDGKPEFEEADTPEKLRTLLAEKLSSRPEAVHEYVTPLFVSRAPNRKMSGQGHMETVKSAKRLDEGVSVLRVPLTQLKLKDLEKMVNREREPKLYEALKARLEAHKDDPAKAFAEPFYKYDKAGNRTQQVKAVRVEQVQKTGVWVRNHNGIADNATMVRVDVFEKGDKYYLVPIYSWQVAKGILPDRAVVQGKDEEDWQLIDDSFNFKFSLHPNDLVEVITKKARMFGYFASCHRGTGNINIRIHDLDHKIGKNGILEGIGVKTALSFQKYQIDELGKEIRPCRLKKRPPVR

SEQ ID NO: 346 - protein, 1082 aa, Neisseria meningitidis
  Neisseria meningitidis 2007056
MAAFKPNPINYILGLDIGIASVGWAMVEIDEDENPICLIDLGVRVFERAEVPKTGDSLAMARRLARSVRRLTRRRAHRLLRARRLLKREGVLQAADFDENGLIKSLPNTPWQLRAAALDRKLTPLEWSAVLLHLIKHRGYLSQRKNEGETADKELGALLKGVADNAHALQTGDFRTPAELALNKFEKESGHIRNQRGDYSHTFSRKDLQAELILLFEKQKEFGNPHVSGGLKEGIETLLMTQRPALSGDAVQKMLGHCTFEPAEPKAAKNTYTAERFIWLTKLNNLRILEQGSERPLTDTERATLMDEPYRKSKLTYAQARKLLGLEDTAFFKGLRYGKDNAEASTLMEMKAYHAISRALEKEGLKDKKSPLNLSPELQDEIGTAFSLFKTDEDITGRLKDRIQPEILEALLKHISFDKFVQISLKALRRIVPLMEQGKRYDEACAEIYGDHYGKKNTEEKIYLPPIPADEIRNPVVLRALSQARKVINGVVRRYGSPARIHIETAREVGKSFKDRKEIEKRQEENRKDREKAAAKFREYFPNFVGEPKSKDILKLRLYEQQHGKCLYSGKEINLGRLNEKGYVEIDHALPFSRTWDDSFNNKVLVLGSENQNKGNQTPYEYFNGKDNSREWQEFKARVETSRFPRSKKQRILLQKFDEDGFKERNLNDTRYVNRFLCQFVADRMRLTGKGKKRVFASNGQITNLLRGFWGLRKVRAENDRHHALDAVVVACSTVAMQQKITRFVRYKEMNAFDGKTIDKETGEVLHQKTHFPQPWEFFAQEVMIRVFGKPDGKPEFEEADTPEKLRTLLAEKLSSRPEAVHEYVTPLFVSRAPNRKMSGQGHMETVKSAKRLDEGVSVLRVPLTQLKLKDLEKMVNREREPKLYEALKARLEAHKDDPAKAFAEPFYKYDKAGNRTQQVKAVRVEQVQKTGVWVRNHNGIADNATMVRVDVFEKGDKYYLVPIYSWQVAKGILPDRAVVQGKDEEDWQLIDDSFNFKFSLHPNDLVEVITKKARMFGYFASCHRGTGNINIRIHDLDHKIGKNGILEGIGVKTALSFQKYQIDELGEEIRPCRLKKRPPVR

SEQ ID NO: 347 - protein, 1082 aa, Neisseria meningitidis
  Neisseria meningitidis 63049
MAAFKPNPINYILGLDIGIASVGWAMVEIDEEENPIRLIDLSVRVFERAEVPKTGDSLAMARRLARSVRRLTRRRAHRLLRARRLLKREGVLQAADFDENGLIKSLPNTPWQLRAAALDRKLTPLEWSAVLLHLIKHRGYLSQRKNEGETADKELGALLKGVADNAHALQTGDFRTPAELALNKFEKESGHIRNQRGDYSHTFSRKDLQAELILLFEKQKEFGNPHVSGGLKEGIETLLMTQRPALSGDAVQKMLGHCTFEPAEPKAAKNTYTAERFVWLTKLNNLRILEQGSERPLTDTERATLMDEPYRKSKLTYAQARKLLGLEDTAFFKGLRYGKDNAEASTLMEMKAYHAISRALEKEGLKDKKSPLRLSPELQDEIGTAFSLFKTDEDITGRLKDRVQPEILEALLKHISFDKFVQISLKALRRIVPLMEQGKRYDEACAEIYGDHYGKKNAEEKIYLPPIPADEIRNPVVLRALSQARKVINGVVRRYGSPARIHIETAREVGKSFKDRKEIEKRQEENRKDREKAAAKFREYFPNFVGEPKSKDILKLRLYEQQHGKCLYSGKEINLGRLNEKGYVEIDHALPFSRTWDDSFNNKVLVLGSENQNKGNQTPYEYFNGKDNSREWQEFKARVETSRFPRSKKQRILLQKFDEDGFKERNLNDTRYVNRFLCQFVADRMRLTGKGKKRVFASNGQITNLLRGFWGLRKVRAENDRHHALDAVVVACSTVAMQQKITRFVRYKEMNAFDGKTIDKETGEVLHQKTHFPQPWEFFAQEVMIRVFGKPDGKPEFEEADTPEKLRTLLAEKLSSRPEAVHEYVTPLFVSRAPNRKMSGQGHMETVKSAKRLDEGVSVLRVPLTQLKLKDLEKMVNREREPKLYEALKARLEAHKDDPAKAFAEPFYKYDKAGNRTQQVKAVRVEQVQKTGVWVRNHNGIADNATMVRVDVFEKGDKYYLVPIYSWQVAKGILPDRAVVQGKDEEDWQLIDDSFNFKFSLHPNDLVEVITKKARMFGYFASCHRGTGNINIRIHDLDHKIGKNGILEGIGVKTALSFQKYQIDELGKEIRPCRLKKRPPVR

SEQ ID NO: 348 - protein, 1082 aa, Neisseria meningitidis
MAAFKPNSINYILGLDIGIASVGWAMVEIDEEENPIRLIDLGVRVFERAEVPKTGDSLAMARRLARSVRRLTRRRAHRLLRTRRLLKREGVLQAANFDENGLIKSLPNTPWQLRAAALDRKLTPLEWSAVLLHLIKHRGYLSQRKNEGETADKELGALLKGVAGNAHALQTGDFRTPAELALNKFEKESGHIRNQRSDYSHTFSRKDLQAELILLFEKQKEFGNPHVSGGLKEGIETLLMTQRPALSGDAVQKMLGHCTFEPAEPKAAKNTYTAERFIWLTKLNNLRILEQGSERPLTDTERATLMDEPYRKSKLTYAQARKLLGLEDTAFFKGLRYGKDNAEASTLMEMKAYHAISRALEKEGLKDKKSPLNLSPELQDEIGTAFSLFKTDEDITGRLKDRIQPEILEALLKHISFDKFVQISLKALRRIVPLMEQGKRYDEACAEIYGDHYGKKNTEEKIYLPPIPADEIRNPVVLRALSQARKVINGVVRRYGSPARIHIETAREVGKSFKDRKEIEKRQEENRKDREKAAAKFREYFPNFVGEPKSKDILKLRLYEQQHGKCLYSGKEINLGRLNEKGYVEIDHALPFSRTWDDSFNNKVLVLGSENQNKGNQTPYEYFNGKDNSREWQEFKARVETSRFPRSKKQRILLQKFDEDGFKERNLNDTRYVNRFLCQFVADRMRLTGKGKKRVFASNGQITNLLRGFWGLRKVRAENDRHHALDAVVVACSTVAMQQKITRFVRYKEMNAFDGKTIDKETGEVLHQKTHFPQPWEFFAQEVMIRVFGKPDGKPEFEEADTLEKLRTLLAEKLSSRPEAVHEYVTPLFVSRAPNRKMSGQGHMETVKSAKRLDEGVSVLRVPLTQLKLKDLEKMVNREREPKLYEALKARLEAHKDDPAKAFAEPFYKYDKAGNRTQQVKAVRVEQVQKTGVWVRNHNGIADNATMVRVDVFEKGDKYYLVPIYSWQVAKGILPDRAVVQGKDEEDWQLIDDSFNFKFSLHPNDLVEVITKKARMFGYFASCHRGTGNINIRIHDLDHKIGKNGILEGIGVKTALSFQKYQIDELGKEIRPCRLKKRPPVR

SEQ ID NO: 349 - protein, 1082 aa, Neisseria meningitidis
  Neisseria meningitidis 92045
MAAFKPNPINYILGLDIGIASVGWAMVEIDEEENPIRLIDLGVRVFERAEVPKTGDSLAMARRLARSVRRLTRRRAHRLLRARRLLKREGVLQAADFDENGLIKSLPNTPWQLRAAALDRKLTPLEWSAVLLHLIKHRGYLSQRKNEGETADKELGALLKGVADNAHALQTGDFRTPAELALNKFEKECGHIRNQRGDYSHTFSRKDLQAELNLLFEKQKEFGNPHVSGGLKEGIETLLMTQRPALSGDAVQKMLGHCTFEPAEPKAAKNTYTAERFIWLTKLNNLRILEQGSERPLTDTERATLMDEPYRKSKLTYAQARKLLGLEDTAFFKGLRYGKDNAEASTLMEMKAYHAISRALEKEGLKDKKSPLNLSPELQDEIGTAFSLFKTDEDITGRLKDRIQPEILEALLKHISFDKFVQISLKALRRIVPLMEQGKRYDEACAEIYGDHYGKKNTEEKIYLPPIPADEIRNPVVLRALSQARKVINGVVRRYGSPARIHIETAREVGKSFKDRKEIEKRQEENRKDREKAAAKFREYFPNFVGEPKSKDILKLRLYEQQHGKCLYSGKEINLVRLNEKGYVEIDHALPFSRTWDDSFNNKVLVLGSENQNKGNQTPYEYFNGKDNSREWQEFKARVETSRFPRSKKQRILLQKFDEEGFKERNLNDTRYVNRFLCQFVADHILLTGKGKRRVFASNGQITNLLRGFWGLRKVRAENDRHHALDAVVVACSTVAMQQKITRFVRYKEMNAFDGKTIDKETGEVLHQKTHFPQPWEFFAQEVMIRVFGKPDGKPEFEEADTPEKLRTLLAEKLSSRPEAVHEYVTPLFVSRAPNRKMSGQGHMETVKSAKRLDEGVSVLRVPLTQLKLKDLEKMVNREREPKLYEALKARLEAHKDDPAKAFAEPFYKYDKAGNRTQQVKAVRVEQVQKTGVWVRNHNGIADNATMVRVDVFEKGGKYYLVPIYSWQVAKGILPDRAVVQGKDEEDWQLIDDSFNFKFSLHPNDLVEVITKKARMFGYFASCHRGTGNINIRIHDLDHKIGKNGILEGIGVKTALSFQKYQIDELGKEIRPCRLKKRPPVR

SEQ ID NO: 350 - protein, 1081 aa, Neisseria meningitidis
  Neisseria meningitidis 93003
MAAFKPNPINYILGLDIGIASVGWAMVEIDEEENPIRLIDLGVRVFERAEVPKTGDSLAMARRLARSVRRLTRRRAHRLLRARRLLKREGVLQAADFDENGLIKSLPNTPWQLRAAALDRKLTPLEWSAVLLHLIKHRGYLSQRKNEGETADKELGALLKGVADNAHALQTGDFRTPAELALNKFEKESGHIRNQRGDYSHTFSRKDLQAELILLFEKQKEFGNPHVSGGLKEGIETLLMTQRPALSGDAVQKMLGHCTFEPAEPKAAKNTYTAERFIWLTKLNNLRILEQGSERPLTDTERATLMDEPYRKSKLTYAQARKLLGLEDTAFFKGLRYGKDNAEASTLMEMKAYHAISRALEKEGLKDKKSPLNLSPELQDEIGTAFSLFKTDEDITGRLKDRVQPEILEALLKHISFDKFVQISLKALRRIVPLMEQGKRYDEACAEIYGDHYGKKNTEEEIYLPPITADEIRNPVVLRALSQARKVINAVVRRYGSPARIHIETAREVGKSFKDRKEIEKRQEENRKDREKAAAKFREYFPNFVGEPKSKDILKLRLYEQQHGKCLYSGKEINLVRLNEKGYVEIDHALPFSRTWDDSFNNKVLVLGSENQNKGNQTPYEYFNGKENSREWQEFKARVETSRFPRSKKQRILLQKFDEDGFKERNLNDTRYVNRFLCQFVADRMRLTGKGKKRVFASNGQITNLLRGFWGLHKVRAENDRHHALDAVVVACSTIAMQQKITRFVRYKEMNAFDGKTIDKETGEVLHQKAHFPQPWEFFAQEVMIRVFGKPDGKPEFEEADTPEKLRTLLAEKLSSRPEAVHEYVTPLFVSRAPNRKMSGQGHMETVKSAKRLDEGISVLRVPLTQLKLKDLEKMVNRAREPKLYEALKARLEAHKDDPAKAFAEPFYKYDKAGNRTQQVKAVRVEQVQKTGVWVRNHNGIADNATMVRVDVFEKAGKYYLVPIYSWQVAKGILPDRAVVAYADEEDWTVIDESFRFKFVLYSNDLIKVQLKKDSFLGYFSGLDRATGAISLREHDLEKSKGKDGMHRIGVKTALSFQKYQIDEMGKEIRPCRLKKRPPVR

SEQ ID NO: 351 - protein, 1081 aa, Neisseria meningitidis
  Neisseria meningitidis 93004
MAAFKPNPINYILGLDIGIASVGWAMVEIDEDENPICLIDLGVRVFERAEVPKTGDSLAMARRLARSVRRLTRRRAHRLLRARRLLKREGVLQAADFDENGLIKSLPNTPWQLRAAALDRKLTPLEWSAVLLHLIKHRGYLSQRKNEGETADKELGALLKGVADNAHALQTGDFRTPAKLALNKFEKESGHIRNQRGDYSHTFSRKDLQAELNLLFEKQKEFGNPHISDGLKEGIETLLMTQRPALSGDAVQKMLGHCTFEPTEPKAAKNTYTAERFVWLTKLNNLRILEQGSEQPLTDTQRAKLMDEPYRKSKLTYAQARKLLGLEDTAFFKGLRYGKDNAEASTLMEMKAYHAISRALEKEGLKDKKSPLNLSPELQDEIGTAFSLFKTDEDITGRLKDRVQPEILEALLKHISFDKFVQISLKALRRIVPLMEQGKRYNEACAEIYGDHYGKKNTEEKIYLPPIPADEIRNPVVLRALSQARKVINGVVRRYGSPARIHIETAREVGKSFKDRKEIEKRQEENRKDREKAAAKFQEYFPNFVGEPKSKDILKLRLYEQQHGKCLYSGKEINLGRLNEKGYVEIDHALPFSRTWDDSFNNKVLVLGSENQNKGNQTPYEYFNGKDNSREWQEFKARVETSRFPRSKKQRILLQKFDEDGFKERNLNDTRYVNRFLCQFVADRMRLTGKGKKRVFASNGQITNLLRGFWGLRKVRAENDRHHALDAVVVACSTVAMQQKITRFVRYKEMNAFDGKTIDKETGEVLHQKTHFPQPWEFFAQEVMIRVFGKPDGKPEFEEADTPEKLRTLLAEKLSSRPEAVHEYVTPLFVSRAPNRKMSGQGHMETVKSAKRLDEGVSVLRVPLTQLKLKDLEKMVNREREPKLYEALKARLEAHKDDPAKAFAEPFYKYDKAGNRTQQVKAVRVEQVQKTGVWVRNHNGIADNATMVRVDVFEKGDKYYLVPIYSWQVAKGILPDRAVVAYADEEDWTVIDESFRFKFVLYSNDLIKVQLKKDSFLGYFSGLDRATGAISLREHDLEKSKGKDGMHRIGVKTALSFQKYQIDEMGKEIRPCRLKKRPPVR

SEQ ID NO: 352 - protein, 1082 aa, Neisseria meningitidis
  Neisseria meningitidis 96023
MAAFKPNPINYILGLDIGIASVGWAMVEIDEDENPICLIDLGVRVFERAEVPKTGDSLAMARRLARSVRRLTRRRAHRLLRARRLLKREGVLQAADFDENGLIKSLPNTPWQLRAAALDRKLTPLEWSAVLLHLIKHRGYLSQRKNEGETADKELGALLKGVADNAHALQTGDFRTPAELALNKFEKESGHIRNQRGDYSHTFSRKDLQAELILLFEKQKEFGNPHVSGGLKEGIETLLMTQRPALSSDAVQKMLGHCTFEPAEPKAAKNTYTAERFIWLTKLNNLRILEQGSERPLTDTERATLMDEPYRKSKLTYAQARKLLGLEDTAFFKGLRYGKDNAEASTLMEMKAYHAISRALEKEGLKDKKSPLNLSPELQDEIGTAFSLFKTDEDITGRLKDRIQPEILEALLKHISFDKFVQISLKALRRIVPLMEQGKRYDEACAEIYGDHYGKKNTEEKIYLPPIPADEIRNPVVLRALSQARKVINGVVRRYGSPARIHIETAREVGKSFKDRKEIEKRQEENRKDREKAAAKFREYFPNFVGEPKSKDILKLRLYEQQHGKCLYSGKEINLGRLNEKGYVEIDHALPFSRTWDDSFNNKVLVLGSENQNKGNQTPYEYFNGKDNSREWQEFKARVETSRFPRSKKQRILLQKFDEDGFKERNLNDTRYVNRFLYQFVADRMRLTGKGKKRVFASNGQITNLLRGFWGLRKVRAENDRHHALDAVVVACSTVAMQQKITRFVRYKEMNAFDGKTIDKETGEVLHQKTHFPQPWEFFAQEVMIRVFGKPDGKPEFEEADTPEKLRTLLAEKLSSRPEAVHEYVTPLFVSRAPNRKMSGQGHMETVKSAKRLDEGVSVLRVPLTQLKLKDLEKMVNREREPKLYEALKARLEAHKDDPAKAFAEPFYKYDKAGNRTQQVKAVRVEQVQKTGVWVRNHNGIADNATMVRVDVFEKGDKYYLVPIYSWQVAKGILPDRAVVQGKDEEDWQLIDDSFNFKFSLHPNDLVEVITKKARMFGYFASCHRGTGNINIRIHDLDHKIGKNGILEGIGVKTALSFQKYQIDELGKEIRPCRLKKRPPVR

SEQ ID NO: 353 - protein, 1081 aa, Neisseria meningitidis
  Neisseria meningitidis 98008
MAAFKPNPINYILGLDIGIASVGWAMVEIDEDENPICLIDLGVRVFERAEVPKTGDSLAAARRLARSVRRLTRRRAHRLLRARRLLKREGVLQAADFDENGLIKSLPNTPWQLRSAALDRKLTPLEWSAVLLHLIKHRGYLSQRKNEGETADKELGALLKGVANNAHALQTGDFRTPAELALNKFEKESGHIRNQRGDYSHTFSRKDLQAELILLFEKQKEFGNPHVSGGLKEGIETLLMTQRPALSGDAVQKMLGHCTFEPAEPKAAKNTYTAERFIWLTKLNNLRILEQGSERPLTDTERATLMDEPYRKSKLTYAQARKLLGLEDTAFFKGLRYGKDNAEASTLMEMKAYHAISRALEKEGLKDKKSPLNLSPELQDEIGTAFSLFKTDEDITGRLKDRIQPEILEALLKHISFDKFVQISLKALRRIVPLMEQGKRYDEACAEIYGDHYGKKNTEEKIYLPPIPADEIRNPVVLRALSQARKVINGVVRRYGSPARIHIETAREVGKSFKDRKEIEKRQEENRKDREKAAAKFREYFPNFVGEPKSKDILKLRLYEQQHGKCLYSGKEINLGRLNEKGYVEIDHALPFSRTWDDSFNNKVLVLGSENQNKGNQTPYEYFNGKDNSREWQEFKARVETSRFPRSKKQRILLQKFDEDGFKERNLNDTRYVNRFLCQFVADRMRLTGKGKKRVFASNGQITNLLRGFWGLRKVRAENDRHHALDAVVVACSTVAMQQKITRFVRYKEMNAFDGKTIDKETGEVLHQKTHFPQPWEFFAQEVMIRVFGKPDGKPEFEEADTPEKLRTLLAEKLSSRPEAVHEYVTPLFVSRAPNRKMSGQGHMETVKSAKRLDEGVSVLRVPLTQLKLKDLEKMVNREREPKLYEALKARLEAHKDDPAKAFAEPFYKYDKAGNRTQQVKAVRVEQVQKTGVWVRNHNGIADNATMVRVDVFEKAGKYYLVPIYSWQVAKGILPDRAVVAYADEEGWTVIDESFRFKFVLYSNDLIKVQLKKDSFLGYFSGLDRATGAISLREHDLEKSKGKDGMHRIGVKTALSFQKYQIDEMGKEIRLCRLKKRPPVR

SEQ ID NO: 354 - protein, 1082 aa, Neisseria meningitidis
MAAFKPNPINYILGLDIGIASVGWAMVEIDEEENPIRLIDLGVRVFERAEVPKTGDSLAMVRRLARSVRRLTRRRAHRLLRARRLLKREGVLQAADFDENGLIKSLPNTPWQLRAAALDRKLTPLEWSAVLLHLIKHRGYLSQRKNEGETADKELGALLKGVADNAHALQTGDFRTPAELALNKFEKESGHIRNQRGDYSHTFSRKDLQAELILLFEKQKEFGNPHISGGLKEGIETLLMTQRPALSGDAVQKMLGHCTFEPAEPKAAKNTYTAERFIWLTKLNNLRILEQGSERPLTDTERATLMDEPYRKSKLTYAQARKLLGLEDTAFFKGLRYGKDNAEASTLMEMKAYHAISRALEKEGLKDKKSPLNLSPELQDEIGTAFSLFKTDEDITGRLKDRIQPEILEALLKHISFDKFVQISLKALRRIVPLMEQGKRYDEACAEIYGDHYGKKNTEEKIYLPPIPADEIRNPVVLRALSQARKVINGVVRRYGSPARIHIETAREVGKSFKDRKEIEKRQEENRKDREKAAAKFREYFPNFVGEPKSKDILKLRLYEQQHGKCLYSGKEINLGRLNEKGYVEIDHALPFSRTWDDSFNNKVLVLGSENQNKGNQTPYEYFNGKDNSREWQEFKARVETSRFPRSKKQRILLQKFDEDGFKERNLNDTRYVNRFLCQFVADRMRLTGKGKKRVFASNGQITNLLRGFWGLRKVRAENDRHHALDAVVVACSTVAMQQKITRFVRYKEMNAFDGKTIDKETGEVLHQKTHFPQPWEFFAQEVMIRVFGKPDGKPEFEEADTPEKLRTLLAEKLSSRPEAVHEYVTPLFVSRAPNRKMSGQGHMETVKSAKRLDEGVSVLRVPLTQLKLKDLEKMVNREREPKLYEALKARLEAHKDDPAKAFAEPFYKYDKAGNRTQQVKAVRVEQVQKTGVWVRNHNGIADNATMVRVDVFEKGDKYYLVPIYSWQVAKGILPDRAVVQGKDEEDWQLIDDSFNFKFSLHPNDLVEVITKKARMFGYFASCHRGTGNINIRIHDLDHKIGKNGILEGIGVKTALSFQKYQIDELGKEIRPCRLKKRPPVR

SEQ ID NO: 355 - protein, 1082 aa, Neisseria meningitidis
  Neisseria meningitidis alpha275
MAAFKPNPINYILGLDIGIASVGWAMVEIDEDENPICLIDLGVRVFERAEVPKTGDSLAAARRLARSVRRLTRRRAHRLLRARRLLKREGVLQAADFDENGLIKSLPNTPWQLRAAALDRKLTPLEWSAVLLHLIKHRGYLSQRKNEGETADKELGALLKGVADNAHALQTGDFRTPAELALNKFEKESGHIRNQRGDYSHTFSRKDLQAELILLFEKQKEFGNPHVSGGLKEGIETLLMTQRPALSGDAVQKMLGHCTFEPAEPKAAKNTYTAERFIWLTKLNNLRILEQGSERPLTDTERATLMDEPYRKSKLTYAQARKLLGLEDTAFFKGLRYGKDNAEASTLMEMKAYHAISRALEKEGLKDKKSPLNLSPELQDEIGTAFSLFKTDEDITGRLKDRVQPEILEALLKHISFDKFVQISLKALRRIVPLMEQGKRYDEACAEIYGDHYGKKNTEEKIYLPPIPADEIRNPVVLRALSQARKVINGVVRRYGSPARIHIETAREVGKSFKDRKEIEKRQEENRKDREKAAAKFREYFPNFVGEPKSKDILKLRLYEQQHGKCLYSGKEINLGRLNEKGYVEIDHALPFSRTWDDSFNNKVLVLGSENQNKGNQTPYEYFNGKDNSREWQEFKARVETSRFPRSKKQRILLQKFDEDGFKERNLNDTRYVNRFLCQFVADRMRLTGKGKKRVFASNGQITNLLRGFWGLRKVRAENDRHHALDAVVVACSTVAMQQKITRFVRYKEMNAFDGKTIDKETGEVLHQKTHFPQPWEFFAQEVMIRVFGKPDGKPEFEEADTPEKLRTLLAEKLSSRPEAVHEYVTPLFVSRAPNRKMSGQGHMETVKSAKRLDEGVSVLRVPLTQLKLKDLEKMVNREREPKLYEALKARLEAHKDDPAKAFAEPFYKYDKAGNRTQQVKAVRVEQVQKTGVWVRNHNGIADNATMVRVDVFEKGDKYYLVPIYSWQVAKGILPDRAVVQGKDEEDWQLIDDSFNFKFSLHPNDLVEVITKKARMFGYFASCHRGTGNINIRIHDLDHKIGKNGILEGIGVKTALSFQKYQIDELGKEIRPCRLKKRPPVR

SEQ ID NO: 356 - protein, 1082 aa, Neisseria meningitidis
  Neisseria meningitidis ATCC 13091
MAAFKPNPINYILGLDIGIASVGWAMVEIDEEENPIRLIDLGVRVFERAEVPKTGDSLAMARRLARSVRRLTRRRAHRLLRTRRLLKREGVLQAANFDENGLIKSLPNTLWQLRAAALDRKLTPLEWSAVLLHLIKHRGYLSQRKNEGETADKELGALLKGVAGNAHALQTGDFRTPAELALNKFEKESGHIRNQRGDYSHTFSRKDLQAELNLLFEKQKEFGNPHISDGLKEGIETLLMTQRPALSGDAVQKMLGHCTFEPTEPKAAKNTYTTERFIWLTKLNNLRILEQGSERPLTDTERATLMDEPYRKSKLTYAQARKLLELDDIAFFKGLRYGKDNAEASTLMEMKAYHAISRALEKEGLKDKKSPLNLSPELQDEIGTAFSLFKTDEDITGRLKDRIQPEILEALLKHINFDKFVQISLKALRRIVPLMEQGKRYDEACAEIYGDHYGKKNTEEKIDLPPIPADEIHNPVVLRALSQARKVINGVVRRYGSPARIHIETAREVGKSFKDRKEIEKRQEENRKDREKAAAKFREYFPNFVGEPKSKDILKLRLYEQQHGKCLYSGKEINLGRLNEKGYVEIDHALPFSRTWDDSFNNKVLVLGSENQNKGNQTPYEYFNGKDNSREWQEFKARVETSRFPRSKKQRILLQKFDEDGFKERNLNDTRYVNRFLCQFVADRMRLTGKGKKRVFASNGQITNLLRGFWGLRKVRAENDRHHALDAVVVACSTVAMQQKITRFVRYKEMNAFDGKTIDKETGEVLHQKTHFPQPWEFFAQEVMIRVFGKPDGKPEFEEADTPEKLRTLLTEKLSSRPEAVHEYVTPLFVSRAPNRKMSGQGHMETVKSAKRLDEGISVLRVPLTQLKLKDLEKMVNREREPKLYEALKARLEAHKDDPAKAFAEPFYKYDKAGNRTQQVKAMRVEQVQKTGVWVRNHNGIADNATMVRVDVFEKGDKYYLVPIYSWQVAKGILPDRAVVQGKDEEDWQLIDDSFNFKFSLHPNDLVEVITKKARMFGYFASCHRGTGNINIRIHDLDHKIGKNGILEGIGVKTALSFQKYQIDELGKEIRPCRLKKRPPVR

SEQ ID NO: 357 - protein, 1081 aa, Neisseria meningitidis
  Neisseria meningitidis N1568
MAAFKPNPINYILGLDIGIASVGWAMVEIDEEENPIRLIDLGVRVFERAEVPKTGDSLAMARRLARSVRRLTRRRAHRLLRARRLLKREGVLQAADFDENGLIKSLPNTPWQLRAAALDRKLTPLEWSAVLLHLIKHRGYLSQRKNEGETADKELGALLKGVADNAHALQTGDFRTPAELALNKFEKECGHIRNQRGDYSHTFSRKDLQAELNLLFEKQKEFGNPHVSGGLKEGIETLLMTQRPALSGDAVQKMLGHCTFEPAEPKAAKNTYTAERFIWLTKLNNLRILEQGSERPLTDTERATLMDEPYRKSKLTYAQARKLLSLEDTAFFKGLRYGKDNAEASTLMEMKAYHTISRALEKEGLKDKKSPLNLSPELQDEIGTAFSLFKTDEDITGRLKDRIQPEILEALLKHISFDKFVQISLKALRRIVPLMEQGKRYDEACAEIYGDHYGKKNTEEKIYLPPIPADEIRNPVVLRALSQARKVINGVVRRYGSPARIHIETAREVGKSFKDRKEIEKRQEENRKDREKAAAKFREYFPNFVGEPKSKDILKLRLYEQQHGKCLYSGKEINLGRLNEKGYVEIDHALPFSRTWDDSFNNKVLVLGSENQNKGNQTPYEYFNGKDNSREWQEFKARVETSRFPRSKKQRILLQKFDEDGFKERNLNDTRYVNRFLCQFVADRMRLTGKGKKRVFASNGQITNLLRGFWGLRKVRAENDRHHALDAVVVACSTVAMQQKITRFVRYKEMNAFDGKTIDKETGEVLHQKTHFPQPWEFFAQEVMIRVFGKPDGKPEFEEADTPEKLRTLLAEKLSSRPEAVHEYVTPLFVSRAPNRKMSGQGHMETVKSAKRLDEGVSVLRVPLTQLKLKDLEKMVNREREPKLYEALKARLEAHKDDPAKAFAEPFYKYDKAGNRTQQVKAVRVEQVQKTGVWVRNHNGIADNATMVRVDVFEKGDKYYLVPIYSWQVAKGILPDRAVVAYADEEDWTVIDESFRFKFVLYSNDLIKVQLKKDSFLGYFSGLDRATGAISLREHDLEKSKGKDGMHRIGVKTALSFQKYQIDEMGKEIRPCRLKKRPPVR

SEQ ID NO: 358 - protein, 1081 aa, Neisseria meningitidis
  Neisseria meningitidis NM140
MAAFKPNPINYILGLDIGIASVGWAMVEIDEDENPICLIDLGVRVFERAEVPKTGDSLAAARRLARSVRRLTRRRAHRLLRARRLLKREGVLQAADFDENGLIKSLPNTPWQLRSAALDRKLTPLEWSAVLLHLIKHRGYLSQRKNEGETADKELGALLKGVADNAHALQTGDFRTPAELALNKFEKESGHIRNRRGDYSHTFSRKDLQAELDLLFEKQKEFGNPHISDDLKEGIETLLMTQRPALSGDAVQKMLGHCTFEPTEPKAAKNTYTAERFVWLTKLNNLRILEQGSERPLTDTERATLMDEPYRKSKLTYAQARKLLELDDTAFFKGLRYGKDNAEASTLMEMKAYHAISRALEKEGLKDKKSPLNLSPELQDEIGTAFSLFKTDEDITGRLKDRVQPEILEVLLKHISFDKFVQISLKALRRIVPLMEQGKRYDEACAEIYGDHDGKKNTEEKIYLPPIPADEIRNPVVLRALSQARKVINAVVRRYGSPARIHIETAREVGKSFKDRKEIEKRQEENRKDREKAAAKFREYFPNFVGEPKSKDILKLRLYEQQHGKCLYSGKEINLGRLNEKGYVEIDHALPFSRTWDDSFNNKVLVLGSENQNKGNQTPYEYFNGKDNSREWQEFKARVETSRFPRSKKQRILLQKFDEEGFKERNLNDTRYVNRFLCQFVADHMLLTGKGKRRVFASNGQITNLLRGFWGLRKVRAENNRHHALDAVVVACSTVAMQQKITRFVRYKEMNAFDGKTIDKETGEVLHQKTHFPQPWEFFAQEVMIRVFGKPDGKPEFEEADTPEKLRTLLAEKLSSRPEAVHEYVTPLFVSRAPNRKMSGQGHMETVKSAKRLDEGVSVLRVPLTQLKLKDLEKMVNREREPKLYEALKARLEAHKDDPAKAFAEPFYKYDKAGNRTQQVKAVRVEQVQKTGVWVRNHNGIADNATMVRVDVFEKAGKYYLVPIYSWQVAKGILPDRAVVAYADEEGWTVIDESFRFKFVLYSNDLIKVQLKKDSFLGYFSGLDRATGAISLREHDLEKSKGKDGMHRIGVKTALSFQKYQIDEMGKEIRLCRLKKRPPVR

SEQ ID NO: 359 - protein, 1082 aa, Neisseria meningitidis
  Neisseria meningitidis NM220
MAAFKPNPINYILGLDIGIASVGWAMVEIDEEENPIRLIDLGVRVFERAEVPKTGDSLAMARRLARSVRRLTRRRAHRLLRARRLLKREGVLQAADFDENGLIKSLPNTPWQLRAAALDRKLTPLEWSAVLLHLIKHRGYLSQRKNEGETADKELGALLKGVANNAHALQTGDFRTPAELALNKFEKESGHIRNQRGDYSHTFSRKDLQAELILLFEKQKEFGNPHVSGGLKEGIETLLMTQRPALSGDAVQKMLGHCTFEPAEPKAAKNTYTAERFIWLTKLNNLRILEQGSERPLTDTERATLMDEPYRKSKLTYAQARKLLGLEDTAFFKGLRYGKDNAEASTLMEMKAYHAISRALEKEGLKDKKSPLNLSSELQDEIGTAFSLFKTDEDITGRLKDRVQPEILEALLKHISFDKFVQISLKALRRIVPLMEQGKRYDEACAEIYGDHYGKKNTEEKIYLPPIPADEIRNPVVLRALSQARKVINGVVRRYGSPARIHIETAREVGKSFKDRKEIEKRQEENRKDREKAAAKFREYFPNFVGEPKSKDILKLRLYEQQHGKCLYSGKEINLVRLNEKGYVEIDHALPFSRTWDDSFNNKVLVLGSENQNKGNQTPYEYFNGKDNSREWQEFKARVETSRFPRSKKQRILLQKFDEDGFKECNLNDTRYVNRFLCQFVADHILLTGKGKRRVFASNGQITNLLRGFWGLRKVRAENDRHHALDAVVVACSTVAMQQKITRFVRYKEMNAFDGKTIDKETGKVLHQKTHFPQPWEFFAQEVMIRVFGKPDGKPEFEEADTPEKLRTLLAEKLSSRPEAVHEYVTPLFVSRAPNRKMSGAHKDTLRSAKRFVKHNEKISVKRVWLTEIKLADLENMVNYKNGREIELYEALKARLEAYGGNAKQAFDPKDNPFYKKGGQLVKAVRVEKTQESGVLLNKKNAYTIADNGDMVRVDVFCKVDKKGKNQYFIVPIYAWQVAENILPDIDCKGYRIDDSYTFCFSLHKYDLIAFQKDEKSKVEFAYYINCDSSNGRFYLAWHDKGSKEQQFRISTQNLVLIQKYQVNELGKEIRPCRLKKRPPVR

SEQ ID NO: 360 - protein, 1082 aa, Neisseria meningitidis
  Neisseria meningitidis NM233
MAAFKPNPINYILGLDIGIASVGWAMVEIDEEENPIRLIDLGVRVFERAEVPKTGDSLAMARRLARSVRRLTRRRAHRLLRARRLLKREGVLQAADFDENGLIKSLPNTPWQLRAAALDRKLTPLEWSAVLLHLIKHRGYLSQRKNEGETADKELGALLKGVANNAHALQTGDFRTPAELALNKFEKESGHIRNQRGDYSHTFSRKDLQAELILLFEKQKEFGNPHVSGGLKEGIETLLMTQRPALSGDAVQKMLGHCTFEPAEPKAAKNTYTAERFIWLTKLNNLRILEQGSERPLTDTERATLMDEPYRKSKLTYAQARKLLGLEDTAFFKGLRYGKDNAEASTLMEMKAYHAISRALEKEGLKDKKSPLNLSSELQDEIGTAFSLFKTDEDITGRLKDRVQPEILEALLKHISFDKFVQISLKALRRIVPLMEQGKRYDEACAEIYGDHYGKKNTEEKIYLPPIPADKIRNPVVLRALSQARKVINGVVRRYGSPARIHIETAREVGKSFKDRKEIEKRQEENRKDREKAAAKFREYFPNFVGEPKSKDILKLRLYEQQHGKCLYSGKEINLVRLNEKGYVEIDHALPFSRTWDDSFNNKVLVLGSENQNKGNQTPYEYFNGKDNSREWQEFKARVETSRFPRSKKQRILLQKFDEDGFKECNLNDTRYVNRFLCQFVADHILLTGKGKRRVFASNGQITNLLRGFWGLRKVRAENDRHHALDAVVVACSTVAMQQKITRFVRYKEMNAFDGKTIDKETGKVLHQKTHFPQPWEFFAQEVMIRVFGKPDGKPEFEEADTPEKLRTLLAEKLSSRPEAVHEYVTPLFVSRAPNRKMSGAHKDTLRSAKRFVKHNEKISVKRVWLTEIKLADLENMVNYKNGREIELYEALKARLEAYGGNAKQAFDPKDNPFYKKGGQLVKAVRVEKTQESGVLLNKKNAYTIADNGDMVRVDVFCKVDKKGKNQYFIVPIYAWQVAENILPDIDCKGYRIDDSYTFCFSLHKYDLIAFQKDEKSKVEFAYYINCDSSNGRFYLAWHDKGSKEQQFRISTQNLVLIQKYQVNELGKEIRPCRLKKRPPVR

SEQ ID NO: 361 - protein, 1082 aa, Neisseria meningitidis
MAAFKPNPINYILGLDIGIASVGWAMVEIDEDENPICLIDLGVRVFERAEVPKTGDSLAMARRLARSVRRLTRRRAHRLLRARRLLKREGVLQAADFDENGLIKSLPNTPWQLRAAALDRKLTPLEWSAVLLHLIKHRGYLSQRKNEGETADKELGALLKGVADNAHALQTGDFRTPAELALNKFEKESGHIRNQRGDYSHTFSRKDLQAELILLFEKQKEFGNPHVSGGLKEGIETLLMTQRPALSSDAVQKMLGHCTFEPAEPKAAKNTYTAERFIWLTKLNNLRILEQGSERPLTDTERATLMDEPYRKSKLTYAQARKLLGLEDTAFFKGLRYGKDNAEASTLMEMKAYHAISRALEKEGLKDKKSPLNLSPELQDEIGTAFSLFKTDEDITGRLKDRIQPEILEALLKHISFDKFVQISLKALRRIVPLMEQGKRYDEACAEIYGDHYGKKNTEEKIYLPPIPADEIRNPVVLRALSQARKVINGVVRRYGSPARIHIETAREVGKSFKDRKEIEKRQEENRKDREKAAAKFREYFPNFVGEPKSKDILKLRLYEQQHGKCLYSGKEINLGRLNEKGYVEIDHALPFSRTWDDSFNNKVLVLGSENQNKGNQTPYEYFNGKDNSREWQEFKARVETSRFPRSKKQRILLQKFDEDGFKERNLNDTRYVNRFLCQFVADRMRLTGKGKKRVFASNGQITNLLRGFWGLRKVRAENDRHHALDAVVVACSTVAMQQKITRFVRYKEMNAFDGKTIDKETGEVLHQKTHFPQPWEFFAQEVMIRVFGKPDGKPEFEEADTPEKLRTLLAEKLSSRPEAVHEYVTPLFVSRAPNRKMSGQGHMETVKSAKRLDEGVSVLRVPLTQLKLKDLEKMVNREREPKLYEALKARLEAHKDDPAKAFAEPFYKYDKAGNRTQQVKAVRVEQVQKTGVWVRNHNGIADNATMVRVDVFEKGDKYYLVPIYSWQVAKGILPDRAVVQGKDEEDWQLIDDSFNFKFSLHPNDLVEVITKKARMFGYFASCHRGTGNINIRIHDLDHKIGKNGILEGIGVKTALSFQKYQIDELGKEIRPCRLKKRPPVR

SEQ ID NO: 362 - protein, 1082 aa, Neisseria meningitidis
MAAFKPNPINYILGLDIGIASVGWAMVEIDEDENPICLIDLGVRVFERAEVPKTGDSLAMARRLARSVRRLTRRRAHRLLRARRLLKREGVLQAADFDENGLIKSLPNTPWQLRAAALDRKLTPLEWSAVLLHLIKHRGYLSQRKNEGETADKELGALLKGVADNAHALQTGDFRTPAELALNKFEKESGHIRNQRGDYSHTFSRKDLQAELILLFEKQKEFGNPHVSGGLKEGIETLLMTQRPALSGDAVQKMLGHCTFEPAEPKAAKNTYTAERFIWLTKLNNLRILEQGSERPLTDTERATLMDEPYRKSKLTYAQARKLLGLEDTAFFKGLRYGKDNAEASTLMEMKAYHAISRALEKEGLKDKKSPLNLSPELQDEIGTAFSLFKTDEDITGRLKDRIQPEILEALLKHISFDKFVQISLKALRRIVPLMEQGKRYDEACAEIYGDHYGKKNTEEKIYLPPIPADEIRNPVVLRALSQARKVINGVVRRYGSPARIHIETAREVGKSFKDRKEIEKRQEENRKDREKAAAKFREYFPNFVGEPKSKDILKLRLYEQQHGKCLYSGKEINLGRLNEKGYVEIDHALPFSRTWDDSFNNKVLVLGSENQNKGNQTPYEYFNGKDNSREWQEFKARVETSRFPRSKKQRILLQKFDEDGFKERNLNDTRYVNRFLCQFVADRMRLTGKGKKRVFASNGQITNLLRGFWGLRKVRAENDRHHALDAVVVACSTVAMQQKITRFVRYKEMNAFDGKTIDKETGEVLHQKTHFPQPWEFFAQEVMIRVFGKPDGKPEFEEADTPEKLRTLLAEKLSSRPEAVHEYVTPLFVSRAPNRKMSGQGHMETVKSAKRLDEGVSVLRVPLTQLKLKDLEKMVNREREPKLYEALKARLEAHKDDPAKAFAEPFYKYDKAGNRTQQVKAVRVEQVQKTGVWVRNHNGIADNATMVRVDVFEKGDKYYLVPIYSWQVAKGILPDRAVVQGKDEEDWQLIDDSFNFKFSLHPNDLVEVITKKARMFGYFASCHRGTGNINIRIHDLDHKIGKNGILEGIGVKTALSFQKYQIDELGKEIRPCRLKKRPPVR

SEQ ID NO: 363 - protein, 1089 aa, Neisseria sp.
  Neisseria sp. oral taxon 014 str. F0314
MTAFKPNPLNYILGLDIGIASVGWAMVEIDDKENPVRLIDLGVRVFERAEMPKTGDSLAAARRLARSVRRLTRRRAHRLLRARRLLKHEGVLKPEDFDENGLVKPLPYIPKQPRNTPWQLRAAALDRKLTPLEWAAVLLHLVKHRGYLSQRKNEGETDDKELGALLKGVADNTHALQAGNFRTPAELALNKFEKESGHIRNQRGDYSHTFSRKDLQAELVLLFEKQKEFGNPYVSDDLKNGIENLLMTQRPALSGDAIQKMLGHCTFEPAEPKAAKNTYTAERFIWLTKLNNLRILNQGNERPLTDAERTTLMDEPYKKSKLTYAQARKLLDLDDTAFFKGLRYGKDNAESATLMEMKAYHAISRALEKEGLKDKKSPLSLSPELQDEIGTAFSLFKTDEEITGRLKGCLQPEILDALLKHISFDKFVQISLKALRRIVPLMEQGKRYDEACAEIYGDHHGRRNSEETLYLPPIPADEIRNPVVLRALSQARKVINGVGRRYGSPARIHIETAREVGKSFKDRKEIEKRQEENRKDREKAAAEFQEYFPNFVGEPKSKDILKLRLYRQQNCKCLYSGKEINLGRLNEKGYVEIDHALPFSRTWDDSFNNKVLVLGSENQNKGNRTPYEYLNGKDNSREWQEFKARVETSRFPHSKKQRILLQKFDEEGFKERNLNDTRYVNRFLCKFVADHMQLTGKGKRRVFASNGQITNLLRGFWGLRKVRAENDRHHALDAVVVACSTVAMQQRITRFVRYKEMNAFDGKTVDKETGEVLHQKTHFPQPWEFFAQEVMIRVFGKPDGKPELEEADTPEKLRALLAEKLSSRPEAVHEYVAPLFVSRAPNRKMSGQGHMETIKSPKRLDEGISVVRVPLTQLKLKDLEKMVNREREPKLYEALKARLEAHKDDPAKAFAEPFYKQDKAGNRTQQVKAVRIEQVQKTGVWVRNQNGIADNATMVRVDVFEKGGKYYLVPIYSWQVAKGILPDKAIIAFKDEEEWQLIDDSFNFKFPLHPNDLVEVITKKARIFGYFASCHRGTGNINIRIHDLDNKVGKNGILEGIGVKTALSFQKYQIDELGKEIRPCRLKKRPPVR

SEQ ID NO: 364 - protein, 1097 aa, Neisseria wadsworthii
  Neisseria wadsworthii 9715
MKKQPQRYILGLDLGIASVGWALILVDGAENPVGLLDCGVRTFERAEVPKTGDSLALARRQARSVRRLIRRRAHRLLRLRRLLKREGILSAADFNSDGLPNLPIDAWQLRVAGLERKLTNQEWAAVLLHLVKHRGYLSQRKSETQTENKELGRLLAGVAENSKLLSESSEQYRTPAELAVKLFAEQSGHLRNKGGEYTHTFNRLDLQKELHLLFERQYALGNPFASAELQSKVDELLMTQRSALQGEAVLKMLGKCTFEPSEYKAAKNTYSAERFIWLTKLNNLRILYNGEERALDEGDRKKLLDEPYKKAKLTYKQVRSILNLPESAVFKGLRYGKDSDGLKAENGTLMEMKAYHKIRTILDKAGLKGEWENRIRNPEILDKIGTAFSLYKTDEDIQAALADLRLPENVLDALLAGLNFDKFIQLSLKALRNILPLMERGIRYDEACKEVYGDHRALAESKNQVLLPPIPADEIRNPVVLRTLTQARKVINAIIRRYGSPQRVHIETARELGKSKQERDKIDRKNKENQNDRNRLASDIRKHFNFEPTPKDILKLRLYEQQHGKCLYSDLREEKGECLYTGNVIELHRLFEDGYVEIDHALPLSRTWDNSLNNKVLVLKSSNQNKGNKTPYEWLDGANNSRRWREFQARVQGCHFPYVKKQRIQTAKLDSKAEQGFLERNLNDTRYISKFMCQFITANLRLAETSNALMEEVAGENPYWKERKRQRVFAPSGSIIALLRGLWGLKKVREDNDRHHALDAIVVACSTVSMQQKITKAMQRRETLETVDSETGEVKTRIPQPWDFFRQEVMIRVFSDSPREELAEKLNSRPEALHDFVSPLFVSRAPNRKMTGQGHLETVKSAKRLSENISVVRKPLTALKLKDIENIVGYPDREPALYQALRERLLAHKDDPVKAFADKPFYKPAKDGGQGSLVKAVRIIENTKHGLKIRNGITDTNGDMVRTDVYQKTDKKGKRQYFIVPVYAWQVEKNELPTVDCKGYEIDDNYEFCFSLYKYDLIEIQNPNDINQELRAYYINCDSSDGRFWLAYHDKSAKEQQFRISTQNQPIIKKYQVDTLGKEIRLCKAEKRTALNGKKKK

SEQ ID NO: 365 - protein, 1426 aa, Niabella soli
  Niabella soli DSM 19437
MPRKNILGLDLGTTSIGFAKIIEDDDYQCSSVELIGVRVNPLTTDEQTNFEKGKPVSVNADRTLKRGMRRNLDRYQLRRDYLIEILRTHHIITADTKLAEDGKNTTHTTYALRALAATAEIPLEAFVRVLLAINKKRGYKSSRKAKNEDEGQLIDGMAIARRLYEESLTPGQFSYQLLKEGKKYLPDFYRSDLNTELNKVWNFQKQFYPEILTDEFKRHLEGKGQRATAVAFWGQHGFSMAENKGSREEKKLHAYKWRSEAAHKQLTKEEVAFVITEINNDLNKSSGYLGAISDRSKELFFNKQTVGQYLHQQLKENPHTRLKGQVFYRQDYLDEFETIWEMQAKFYSALTLELKEEVRDVVIFYQRKLKSQMGLISLCEFESKEIEIEKNGEKAKKRIGLRVAPKSSPLFQEFKIWQVLNNLEFRNKKTKEVFVPEMAAKQQLFDELNIKGNLLASEAIKILGYKTKDWEANYHTLEGNRTNKSLYDAWLKILELEGYDENLLKLSGSDDIDVSKIEKPALEIRQMVLAVFEVLGISGAILDFDAEADGKAFEQQPAYQLWHLLYSAEDDGKKYSQEDIFTYGHDNIGLKKKLCEKFGFRPEHTKILVNVVFSDDYGNLSSKAMRRIYPFIKELTYDKACAEAGYRHSAASLTKEEIAARPLQNRLDLLKKNELRSPVVEKILNQMVNVVNTLVDDENQNRKARGLSEDFHFDEIRIELARELKKNAKERAEMTTNINTAKQSHEKIIRILQTEFGVPNPSRNDIVRYKLYEELKNNGYKDLYTNTYISRDILFSKQIDVDHIIPQMSLFDDSFSNKTVVFRKDNQDKGNKTAYDYILGKYGEQALEEYISRITSLFELGKKNKEEGIGKAKFQKLQKRLVDIGDGFIERDLRESQYIAKKANNMLYAICRSVVSTSGEITARLREDWDLVNVMQEINLPKFRALGLTEMVEKKDGAQKERITDWTKRNDHRHHAMDALAIAFTRHSHIQYLNHLNARKDEANKWHPVVSKIEEKETVLIYDDLGNRKRKFKAPMPNFREVVKEHLENVLISHKAKNKVVTKNKNKIKTVRGEKVKTELTPRGQLHKETIYGRYRYYESKEEKIGPKFDAEMIGMVTNPQYKKLLLERLAANGNDPKKAFWGKNALNKNPLYVDEARQELLPEKILLRWLNDDYSIRKDVTPENLKDIKTIEKILDKGVKKILLKRLADFGNDPKKAFSDLDKNPIWQNEAKRIAIKRVTISGIKNAAPLHHKKDHLGNDILDEKGKQIPSSFVSTGNNHHVAIYRDAEGNLQERVVSLFDAVQLVNGGEPVIDKEYNKGIGWQFLFTMKQNEMFVFPDEKTGFNPREVDLLSSGNRKLISPNLFRVQKLASKNYFFRHHLETSVEEKKELKNIAYKPQLGLNALSNIVKVRINHIGEIVSVGEY

SEQ ID NO: 366 - protein, 1132 aa, Nitratifractor salsuginis
MKKILGVDLGITSFGYAILQETGKDLYRCLDNSVVMRNNPYDEKSGESSQSIRSTQKSMRRLIEKRKKRIRCVAQTMERYGILDYSETMKINDPKNNPIKNRWQLRAVDAWKRPLSPQELFAIFAHMAKHRGYKSIATEDLIYELELELGLNDPEKESEKKADERRQVYNALRHLEELRKKYGGETIAQTIHRAVEAGDLRSYRNHDDYEKMIRREDIEEEIEKVLLRQAELGALGLPEEQVSELIDELKACITDQEMPTIDESLFGKCTFYKDELAAPAYSYLYDLYRLYKKLADLNIDGYEVTQEDREKVIEWVEKKIAQGKNLKKITHKDLRKILGLAPEQKIFGVEDERIVKGKKEPRTFVPFFFLADIAKFKELFASIQKHPDALQIFRELAEILQRSKTPQEALDRLRALMAGKGIDTDDRELLELFKNKRSGTRELSHRYILEALPLFLEGYDEKEVQRILGFDDREDYSRYPKSLRHLHLREGNLFEKEENPINNHAVKSLASWALGLIADLSWRYGPFDEIILETTRDALPEKIRKEIDKAMREREKALDKIIGKYKKEFPSIDKRLARKIQLWERQKGLDLYSGKVINLSQLLDGSADIEHIVPQSLGGLSTDYNTIVTLKSVNAAKGNRLPGDWLAGNPDYRERIGMLSEKGLIDWKKRKNLLAQSLDEIYTENTHSKGIRATSYLEALVAQVLKRYYPFPDPELRKNGIGVRMIPGKVTSKTRSLLGIKSKSRETNFHHAEDALILSTLTRGWQNRLHRMLRDNYGKSEAELKELWKKYMPHIEGLTLADYIDEAFRRFMSKGEESLFYRDMFDTIRSISYWVDKKPLSASSHKETVYSSRHEVPTLRKNILEAFDSLNVIKDRHKLTTEEFMKRYDKEIRQKLWLHRIGNTNDESYRAVEERATQIAQILTRYQLMDAQNDKEIDEKFQQALKELITSPIEVTGKLLRKMRFVYDKLNAMQIDRGLVETDKNMLGIHISKGPNEKLIFRRMDVNNAHELQKERSGILCYLNEMLFIFNKKGLIHYGCLRSYLEKGQGSKYIALFNPRFPANPKAQPSKFTSDSKIKQVGIGSATGIIKAHLDLDGHVRSYEVFGTLPEGSIEWFKEESGYGRVEDDPHH

SEQ ID NO: 367 - protein, 1166 aa, Nitrobacter hamburgensis
MHVEIDFPHFSRGDSHLAMNKNEILRGSSVLYRLGLDLGSNSLGWFVTHLEKRGDRHEPVALGPGGVRIFPDGRDPQSGTSNAVDRRMARGARKRRDRFVERRKELIAALIKYNLLPDDARERRALEVLDPYALRKTALTDTLPAHHVGRALFHLNQRRGFQSNRKTDSKQSEDGAIKQAASRLATDKGNETLGVFFADMHLRKSYEDRQTAIRAELVRLGKDHLTGNARKKIWAKVRKRLFGDEVLPRADAPHGVRARATITGTKASYDYYPTRDMLRDEFNAIWAGQSAHHATITDEARTEIEHIIFYQRPLKPAIVGKCTLDPATRPFKEDPEGYRAPWSHPLAQRFRILSEARNLEIRDTGKGSRRLTKEQSDLVVAALLANREVKFDKLRTLLKLPAEARFNLESDRRAALDGDQTAARLSDKKGFNKAWRGFPPERQIAIVARLEETEDENELIAWLEKECALDGAAAARVANTTLPDGHCRLGLRAIKKIVPIMQDGLDEDGVAGAGYHIAAKRAGYDHAKLPTGEQLGRLPYYGQWLQDAVVGSGDARDQKEKQYGQFPNPTVHIGLGQLRRVVNDLIDKYGPPTEISIEFTRALKLSEQQKAERQREQRRNQDKNKARAEELAKFGRPANPRNLLKMRLWEELAHDPLDRKCVYTGEQISIERLLSDEVDIDHILPVAMTLDDSPANKIICMRYANRHKRKQTPSEAFGSSPTLQGHRYNWDDIAARATGLPRNKRWRFDANAREEFDKRGGFLARQLNETGWLARLAKQYLGAVTDPNQIWVVPGRLTSMLRGKWGLNGLLPSDNYAGVQDKAEEFLASTDDMEFSGVKNRADHRHHAIDGLVTALTDRSLLWKMANAYDEEHEKFVIEPPWPTMRDDLKAALEKMVVSHKPDHGIEGKLHEDSAYGFVKPLDATGLKEEEAGNLVYRKAIESLNENEVDRIRDIQLRTIVRDHVNVEKTKGVALADALRQLQAPSDDYPQFKHGLRHVRILKKEKGDYLVPIANRASGVAYKAYSAGENFCVEVFETAGGKWDGEAVRRFDANKKNAGPKIAHAPQWRDANEGAKLVMRIHKGDLIRLDHEGRARIMVVHRLDAAAGRFKLADHNETGNLDKRHATNNDIDPFRWLMASYNTLKKLAAVPVRVDELGRVWRVMPN

SEQ ID NO: 368 - protein, 1044 aa, Nitrosomonas sp.
  Nitrosomonas sp. AL212
MLHKMRYRLALDLGSTSLGWAMVRLNANQQPCAVIKAGVRIFSNGRNPKDGSSLAVTRREARSMRRRRDRLLKRKARMMRTLIEYGFFPANETQRKALENLNPYALRAKGLDEALTPSEFARALFHINQRRGFKSNRKTDKKDSDSGALKTAIKQLHSVLDPQGNDGKPRTVGELLYKRFTDLSKLPKDRTVRARYRQDKIVKDDGKTKIDKYYDLYIDRAMIEQEFDALWKKQSELNPILFTENARADLKDVLLYQRSLKPVKPGRCTFMSEEERAPLALPSTQRFRMYQEVNNLRILREGLKEESLTLQQRDDLINALEKNNRRTFTQIKKLLGVGGSVQFNFEDPKREELKGNTTSAILGKSEHFGEAWFAFNEAKQDAIVLQLIKEENEAKLVRWLQDETGIDEKRAEVIANAGLPEGYGSLCIEALARILPELRRDVVTYDKAVQAAGFEHHSKLNRNEEIPDITFKIESIDRNSGEIKQFHLHKELPYYGEYLQRHVGFGSGKPEDSIEKRYGKIANPTVHIGLNQVRVVVNALIKRYGHPSEIIVEVARDLKQSKDRRDEENKRQAENQKRNERLRKDIADILGISEERVRRDDIEKMILWEELSFDPADRRCPYSGVQVSTVMLLSDEVEVEHILPFSQTLDDSLNNKTVALRQANRIKGNRTPWEAFGTSNISGFDYSGILTRAELMPKAKRYRFAEDGYQRWLKDDAGFLARALNDTRHLSKIAREYMSLICPNTRVIPGQMTAMLRRNFGLNDVLGLNGEKNRNDHRHHAVDACVIAVTDQGLLQRFAAASASARERQLNRLVENMPLPWESYREHVRRAIDGIWVSHRPDHSHEGAMHNDTAYGLRGNGRVSFHKMVEGKREYIEDNLKVIEITDTKAIDRHGLLPTGKPRPYKGYKGDSNYCIEIVRNEKGRWEGEIISTFDAYQLVRKYGIVQLRYPVLSVSGKPLVMRLIRNDFVRLEHEGITRTLRVCKMREDGQVALADVTEANVDARTRTKEICYVFKTGGSLQKAKARRITISPIGELRDPGFKE

SEQ ID NO: 369 - protein, 1498 aa, Odoribacter laneus
  Odoribacter laneus YIT 12061
METTLGIDLGTNSIGLALVDQEEHQILYSGVRIFPEGINKDTIGLGEKEESRNATRRAKRQMRRQYFRKKLRKAKLLELLIAYDMCPLKPEDVRRWKNWDKQQKSTVRQFPDTPAFREWLKQNPYELRKQAVTEDVTRPELGRILYQMIQRRGFLSSRKGKEEGKIFTGKDRMVGIDETRKNLQKQTLGAYLYDIAPKNGEKYRFRTERVRARYTLRDMYIREFEIIWQRQAGHLGLAHEQATRKKNIFLEGSATNVRNSKLITHLQAKYGRGHVLIEDTRITVTFQLPLKEVLGGKIEIEEEQLKFKSNESVLFWQRPLRSQKSLLSKCVFEGRNFYDPVHQKWIIAGPTPAPLSHPEFEEFRAYQFINNIIYGKNEHLTAIQREAVFELMCTESKDFNFEKIPKHLKLFEKFNFDDTTKVPACTTISQLRKLFPHPVWEEKREEIWHCFYFYDDNTLLFEKLQKDYALQTNDLEKIKKIRLSESYGNVSLKAIRRINPYLKKGYAYSTAVLLGGIRNSFGKRFEYFKEYEPEIEKAVCRILKEKNAEGEVIRKIKDYLVHNRFGFAKNDRAFQKLYHHSQAITTQAQKERLPETGNLRNPIVQQGLNELRRTVNKLLATCREKYGPSFKFDHIHVEMGRELRSSKTEREKQSRQIRENEKKNEAAKVKLAEYGLKAYRDNIQKYLLYKEIEEKGGTVCCPYTGKTLNISHTLGSDNSVQIEHIIPYSISLDDSLANKTLCDATFNREKGELTPYDFYQKDPSPEKWGASSWEEIEDRAFRLLPYAKAQRFIRRKPQESNEFISRQLNDTRYISKKAVEYLSAICSDVKAFPGQLTAELRHLWGLNNILQSAPDITFPLPVSATENHREYYVITNEQNEVIRLFPKQGETPRTEKGELLLTGEVERKVFRCKGMQEFQTDVSDGKYWRRIKLSSSVTWSPLFAPKPISADGQIVLKGRIEKGVFVCNQLKQKLKTGLPDGSYWISLPVISQTFKEGESVNNSKLTSQQVQLFGRVREGIFRCHNYQCPASGADGNFWCTLDTDTAQPAFTPIKNAPPGVGGGQIILTGDVDDKGIFHADDDLHYELPASLPKGKYYGIFTVESCDPTLIPIELSAPKTSKGENLIEGNIWVDEHTGEVRFDPKKNREDQRHHAIDAIVIALSSQSLFQRLSTYNARRENKKRGLDSTEHFPSPWPGFAQDVRQSVVPLLVSYKQNPKTLCKISKTLYKDGKKIHSCGNAVRGQLHKETVYGQRTAPGATEKSYHIRKDIRELKTSKHIGKVVDITIRQMLLKHLQENYHIDITQEFNIPSNAFFKEGVYRIFLPNKHGEPVPIKKIRMKEELGNAERLKDNINQYVNPRNNHHVMIYQDADGNLKEEIVSFWSVIERQNQGQPIYQLPREGRNIVSILQINDTFLIGLKEEEPEVYRNDLSTLSKHLYRVQKLSGMYYTFRHHLASTLNNEREEFRIQSLEAWKRANPVKVQIDEIGRITFLNGPLC

SEQ ID NO: 370 - protein, 1389 aa, Oenococcus kitaharae
  Oenococcus kitaharae DSM 17330
MARDYSVGLDIGTSSVGWAAIDNKYHLIRAKSKNLIGVRLFDSAVTAEKRRGYRTTRRRLSRRHWRLRLLNDIFAGPLTDFGDENFLARLKYSWVHPQDQSNQAHFAAGLLFDSKEQDKDFYRKYPTIYHLRLALMNDDQKHDLREVYLAIHHLVKYRGHFLIEGDVKADSAFDVHTFADAIQRYAESNNSDENLLGKIDEKKLSAALTDKHGSKSQRAETAETAFDILDLQSKKQIQAILKSVVGNQANLMAIFGLDSSAISKDEQKNYKFSFDDADIDEKIADSEALLSDTEFEFLCDLKAAFDGLTLKMLLGDDKTVSAAMVRRFNEHQKDWEYIKSHIRNAKNAGNGLYEKSKKFDGINAAYLALQSDNEDDRKKAKKIFQDEISSADIPDDVKADFLKKIDDDQFLPIQRTKNNGTIPHQLHRNELEQIIEKQGIYYPFLKDTYQENSHELNKITALINFRVPYYVGPLVEEEQKIADDGKNIPDPTNHWMVRKSNDTITPWNLSQVVDLDKSGRRFIERLTGTDTYLIGEPTLPKNSLLYQKFDVLQELNNIRVSGRRLDIRAKQDAFEHLFKVQKTVSATNLKDFLVQAGYISEDTQIEGLADVNGKNFNNALTTYNYLVSVLGREFVENPSNEELLEEITELQTVFEDKKVLRRQLDQLDGLSDHNREKLSRKHYTGWGRISKKLLTTKIVQNADKIDNQTFDVPRMNQSIIDTLYNTKMNLMEIINNAEDDFGVRAWIDKQNTTDGDEQDVYSLIDELAGPKEIKRGIVQSFRILDDITKAVGYAPKRVYLEFARKTQESHLTNSRKNQLSTLLKNAGLSELVTQVSQYDAAALQNDRLYLYFLQQGKDMYSGEKLNLDNLSNYDIDHIIPQAYTKDNSLDNRVLVSNITNRRKSDSSNYLPALIDKMRPFWSVLSKQGLLSKHKFANLTRTRDFDDMEKERFIARSLVETRQIIKNVASLIDSHFGGETKAVAIRSSLTADMRRYVDIPKNRDINDYHHAFDALLFSTVGQYTENSGLMKKGQLSDSAGNQYNRYIKEWIHAARLNAQSQRVNPFGFVVGSMRNAAPGKLNPETGEITPEENADWSIADLDYLHKVMNFRKITVTRRLKDQKGQLYDESRYPSVLHDAKSKASINFDKHKPVDLYGGFSSAKPAYAALIKFKNKFRLVNVLRQWTYSDKNSEDYILEQIRGKYPKAEMVLSHIPYGQLVKKDGALVTISSATELHNFEQLWLPLADYKLINTLLKTKEDNLVDILHNRLDLPEMTIESAFYKAFDSILSFAFNRYALHQNALVKLQAHRDDFNALNYEDKQQTLERILDALHASPASSDLKKINLSSGFGRLFSPSHFTLADTDEFIFQSVTGLFSTQKTVAQLYQETK

SEQ ID NO: 371 - protein, 1389 aa, Oenococcus kitaharae; identical to SEQ ID NO: 370
  Oenococcus kitaharae DSM 17330

SEQ ID NO: 372 - protein, 1399 aa, Olsenella uli
MNLRNTTDEYNIGLDMGTNSVGWAVTDKAGAIAHFKGKPTLGSRLFDAAQTAAGARIHRSQRRRYVRRRWRLDLLQSLFQDEVSKVDSEFFCRLRQSRLYVGDREKGHADYTWPIFNDSDFNEVDYYKRFPTIYHLRKWLMETDEKADIRLIYLATHNIVKHRGNFLRENNKSLSSRDANPAQAVKSLRLALNDWCSERDYECAWKGEEDDGAIDEAILNVLADGEKGRSDQAKEIAKLTGVDCGDAKQSKQCNEAIAKAIVGLKVEMKNIFGEFPAEKTSYIYLSSDEDVEAVRESCPDDSGELFQALCKLYSAYILQELLSYADPSGQTISANMVAKYKQYGRDLRLLKELTRTYAPQKYDLFFRGETYAGSSDYVVDEARGYTRYNLGTTKANYDDFQKSVKELFKGTDALQDERYQEMMVAFGEQKFLRRLKTSDNGSIYYQLHLEELHTILENQGKHYPFLLSEEDKIESLVSFRIPYYVGPLTRKNAAIGHDGKERFAWSSRKDGMEHAVITPWNWEEIIDRDKSAEDFIMRMTGDCTYLQGEPVLPKCSLLYEEFCALNEFNGAHWTVDGDDERRFDAAQRERIMCDLFRRTRSVTYNKVSDWLERKYNFTGARVRGGQGEHGFESKLGSYIFFCKDVFKTDGLDEADYTMIEQIILWSTLFEDRDILKRKIEEAYGGDRLTSEQIKVICKKRFTGWGRLSKRLLTDIKVNTDTGRKSIMDVLREGNPNNGQRSRTMVFMEVLRDEDLGFQKAIDGLNRDYFREHNNGLMDVNDLPGSPAIRRSINQAVRIVDEIASIARKEPTNIFIEVTREEDDPRKKGKRTKRRYDAIKSALEKFKKDDPSLWKELCEKAPGDMDERLSLYFMQRGKCMYSGRPIKIEELHTGKYEVDHIIPRSYIKDDSFENKVLVYREENQHKTDALLIDSSIRQKMGGYWRMLHDAKLVGDKKFRNLFRNHIDDKAMKGFVARQIVETSQMVKLVQTLFEARYPNTRIVPVKAGISHDLREAAGLVKCREANDFHHAHDAFLACRIGLFIQKRHPSVYDNPIGLARIMRDYARMQAREYKKSHCLAHTQGFIVNSFLSSGFDEETGEIFKDDWDAKAEVEGIRRVLNCRQCFISRMPVEGDTRYGGRYWGETIYSPKGKHKHEIPLKQGLDPNLYGGYSDLLYSYFLIYEASDVSSGERVLRFIGIPTSIAARMANQKRLEEYVSRLALQENLEHVRMVRKIMKKQLIEVDNCRLLVTAADAVTNATELAFSLDEMKIISTCAKCINGADPSAIDKIGNAQDSFFDNLKRRGSDRCALLFSQLKLDKLSQNFYMISSDDKSKILISILDRIRAKSNSVDLSLVGGAKHAAQMKFDFNAKLNNPASSFVLIDQSVTGMFERRTRIGL

SEQ ID NO: 373 - protein, 1535 aa, Ornithobacterium rhinotracheale
MNTILGLDLGTNSIGWALIKVLNDKTRLPLEIIDLGVVVIPTDQRTLDKFSKGESISKTAERTKQKGVRKLYERKKLRRERLHRVLNILGFLPEHYSKKIDFKKHLGQFFGNSQPKISYVENDHGKHEFIFMDSYREMLKEFSKHNIKNVPYDWTIYYLRKKALSQKISKEELAWVILNFNKKRGYYQFRDDNADENKENKIEKYYALKVTNVKKEDAQNYTITLENGWIYKNKSKISLLDWVGSTKEFISTEKFDNKGNIIKKKNGEDDRTLKLVDSEKDWIAIKKSTEDRIENYGKTVGTYLYEHLLKDPNQKLNGELINIIDRKFYKNELKQILEKQKEFHPELLNEDLFQKSIIELYPKNSTRQKELKNKDLCYLLIDDVIYYQRDLKKKNSTINKCSFESREYYLNGEKQIQKINCIAKSKPLYQEFRTLQFIKNLKVYEIIDGLEKDITSKLLPDFETKEHFFEWLNDKEKIDQLQLLSYKCFDLHDNVKNDLIAKGIKRPTEKAIRTELLEKYRWNYSKDNDRNFLLNETRFKILKYLKKVDKKLTLTNEQIESLWLLLYSAKDERELKNGLQKFSEKNKLPKKFSDIFISFPPFKKEYGAYSEKALKKLLSLVRFGKYWSFNKIDNNIQNKIMNILNGEVDDSISDRVREKTILLQDKNDFQDLPLWLASYVAYNRFSEVSEIKYWDSPDKIEFLKQHSIGNPIVEKIINETLKLIKDIWVIHGKSCKNFFSEIHIELSREIKSSSKKRAQITNNNTKNQKLNNLIKSLLIEMASDTKYENVTPYSPSQQEILKIYDEGIYSKEENSEKIKEINKIRNNNKISKSDITKYKLWLEQGYISPYTGKIIPLTKLFTAKYQKEHIIPQTKFFDDSFNNKVICEAEVNKLKDNSLAMNFIKAKGGKAVKLSDGETVTILNQEEYKQLVRTSFKKNSIKLRNLLLEEIPDTFTKRQLNDTKYISKLVLSLLSNIVREKGELESTAKRIVSTNGQITSILRNDWGLNNIWNKLITPRFERLNNINKNKIYGNWENKKGKNVFQINYLNDNLSTLNTKRIDHRHHALDALIVACTTRNHINFLNNQYAKSRNQRHDLRAKLKRRETITTEGSKKQVFKDFIKPWESFTQDALKKLETTIVNFKVNKRIINKTINWYKKWEKQKDGTYKKIQKKQTKGDAWAIRKPLHIDTIYGIVCKKLPLKSALENYKNIIDENLKHKIKELKEVNKFDNNQIINFFKECNFIFEDNNIQKVEVYDFKDNRDKTILSSSRQLIDESFTPKKIGKVLDPTIRNILLKHLNSTKYNNKFDSDGNPIKPEKLAFSPEGLKDLNKNIKHLNNNKEHQPIKRVKLFETLGNKIKVGYTQQKNKKFAETATGTNLFLGIYSDNNKRDFKTIPLILAIQREKEGLNPCPDTDEKGNQLLFSLSPNELVFVPNNEERKNPNLVDFENLSKDQIDRIYKFVSCTGSEAYFVPSRTAKPIIENENGTNNKSQRIIEFNEKTSIKNEKNEPVLIKTICWKIEVNRLGKIIKVIK

SEQ ID NO: 374 - protein, 1443 aa, Parabacteroides johnsonii
  Parabacteroides johnsonii DSM 18315
MIKLLYLEKLKQYTMKKILGLDLGTSSIGWALVNEAENSDEVSSIIKLGVRVNPLTVDEMQNFEKGKSITTNADRTLKRSMRRNLQRYKLRRDALIELLKKVGFITDKTILSEQGNRTTFETYRLRAKAAEEEISLKELARVLLMINKKRGYKSSRKAKGEEEGALIDGMEIAKKLYDEDLTPGQLCLQLLESGKKFFPDFYRSDLQEEFNKIWDFQKQFNLFSFCDVAKEEVKGKNKSQTWAILAKYFVETKKVNVWNEHEAQTENREEVYKLVGLKRTVKGEELKKENYRWRVQALTEQLDLEKIAVVLQEINGQISASSGYLGAISDRSKVLYFNRQTVGQYQMAELNKNPNMSLRNMVFYRQDYLDEFNVIWEKQAEFHKELTPELKKEIRDIIIFYQRRLKSQKGLISFCEFENREVVVEKEGKKQTKIIGCKVIPRSHPLFQEFKIWQTLNNIEVFVGEKKGKRKKSNVSSDLFGDTEDALITEGRRFLYQEEKKILAKELSIKKGLTKAEILRLLFENPQELDINFKQIDGNQTGFALFSAYSNMIEKYGYEPLDFKKPAEDLISQLKTVFTDLGWNTDLLFIDLDKENKEWEKQPYFRLWHLLYSFEGDNTPTGNGKLIEKIMQLCGIEKEYAIELANVSLQDDYGSLSAKAIKKILLYLKEGNQYDMACEYAGYRHSKSSLTKEEIENKVLKDKLEILPKNSLRNPVVEKILNQMVNVINTVMEVYGRPDEIRVELARELKKSAKEREELTKAVAKNTREHEEIRKVLQSEFGMINVSRNDIIRYKLYEELKDNGYKTLYSNQYIPREKLFSKEIDIEHIIPQSRLFDDSLSNKTLEYKSINIEKGNKTAYDFVKEKYGEEGLQQYLNRCENLCKDKKAKLRKLKMELNEIPDGFIDRDLRNTQYIAKKALSMLTEICRRVVATTGSITDKLREDWQLVDVMKELNLPKYEALGLVEVYEDKDGRKIKRIKDWTKRNDHRHHAMDALTVAFTKDVFIQYFNNKNAAWESDSKEHTNIVGIKTRYFESGKAVPPIPLGQFRVEAKCHLENLLVSIKAKNKVVTTNVNCIKKKGGTYKNTQQTPRGQLHLETIYGSHNQYVTKIEKVNASFDAVKIATVSKQDYRNALLKRLEVFGNDPKKAFTGKNSLEKNPIYLDRAQTIQVPDKVQTVELETAYTIRKPVDPTLNVDKVVDKKIRLILEQRLKEYGGDAKKAFVNLDENPIWLNEEKGISIKRVTIRGISKAQALHDKKDKDGNFILDETGKRIPVDFVNTGNNHHVAIYRKPVLDKKGQVIFDDEGNPMYELDEDVVPFFEAVTRANLGIPIIDKDYKKSEGWQFLFSMKQNEYFVFPNEKTGFNPKEVDLLDPDNYAMISPNLFRVQKIGLNDYTFRHHLETTIQNDLKFITWIRCGKSGIKDIVKVRINHIGQIVSVGEY

SEQ ID NO: 375 - protein, 1424 aa, Parabacteroides sp.
  Parabacteroides sp. D13
MKRILGLDLGTNSIGWALVNEAETDEEVSSIIRLGVRVNPLTVDETQNFEKGKSITTNAERTLKRSMRRNLQRYKLRRDALVEFLKELGFITDETILSEQGNRTTFETCRLRAKAAEEEISLEELSRVLLMINKKRGYKSSRKVKKEEDGVLIDGMEIAKKLYEEDLTPGQLCSQLLESGKKVLPDFYRSDLQEELDRIWSVQKQFHPDVFCDAAKEEIKGKNRSQTWAILANYFVWKEEVVGWNDREAKNETIEKECKLVGLKRTTKGYELKKENYRWRAQALTEQLGLEEIAVVLQEINGQINASSGYLGAISDRSKVLYFNHQTVGQYQMAELDKNPHASLRNMVFYRQDYLDEFDRIWEKQAEFHKELTAELKKEIRDMIIFYQRRLKSQKGLISFCEFERLEIVVEKDGKKQTKVIGCKVIPRSHPLFQEFKVWQTLNDIKVLGREKKRNALSASESRALYPEEKEILARELAIKENMKKADVLKLLFENPQELDLNFKQIDGNRTGFSLFSAYSKMIEKYGYEPLDFKKPADEIIGQLRTIFTDLGWNTNLFTIDLTKEGKELEMQPYFRLWHLLYSFEGDNTSTGNGKLIEKIMQLCGVEKEYAVELASLSFQDDYGSLSAKAIKRILPYLKEGNLYDVACEYAGYRHSKSSLTKEEIENKVLKGKLEVLPKNSLRNPVVEKILSQMVNVINTIIDTYGKPDEIRVELARELKKSAKEREELTKAIAKSTREHEEIRKLLQDEFGMMNVSRNDIIRYKLYEELKDNGYKTLYSNQYIPKEKIFSKEIDIEHIIPQSRLFDDSLSNKTLEYKAINIEKGNKTAYDFVKEKYGEEGLQQYINRCESLFNDKKAKLRKLKMEQKDIPDGFIDRDLRNTQYIAKKALAMLNEICRRVVATTGSITDQLREDWQLVDVMKELNLPKYEALGFVETYEDKDGRKIKRIKDWTKRNDHRHHAMDALTVAFTKDAFIQYFNNKNAAQDSGNRNHTNIIGIKTRYFDKGRALPPIPLEQFRIEAKQHLEKLLVSIKAKNKVVTVNVNRTKKRKGENTKIQQTPRGQLHLETVYGSHKQYVTKIEKVNASFDAAKIATVSKRAYRNALLKRLETFGNDPKKAFTGKNALEKNPLYADKYQTIRVPEKVQTVEFETIYTIRKPVDPALNVDKVVDVKVRAILERRLKEYGGDPKKAFVNFWENPIWLNKEKGISIKRVSIRGINNAQSIHVKKDKNGNPIWDENGKQIPVDFVNTGNNHHVAIYRKPVLDKKGQVTFDEDGNLMYELDEVVVPFFEAVTRANLGLPIIDKDYRKSEGWQFLFSMKQNEYFVFPNEKTGFNPKEVDLLNPDNYAMISPNLFRVQTMSKVMYGNNVVRDYKFRHHLETTVKDMKELKDIAYKQYKTLSFGNSVVKIRINHIGQIVSVGEY

SEQ ID NO: 376 - protein, 1428 aa, Parasutterella excrementihominis
  Parasutterella excrementihominis YIT 11859
MGKTHIIGVGLDLGGTYTGTFITSHPSDEAEHRDHSSAFTVVNSEKLSFSSKSRTAVRHRVRSYKGFDLRRRLLLLVAEYQLLQKKQTLAPEERENLRIALSGYLKRRGYARTEAETDTSVLESLDPSVFSSAPSFTNFFNDSEPLNIQWEAIANSPETTKALNKELSGQKEADFKKYIKTSFPEYSAKEILANYVEGRRAILDASKYIANLQSLGHKHRSKYLSDILQDMKRDSRITRLSEAFGSTDNLWRIIGNISNLQERAVRWYFNDAKFEQGQEQLDAVKLKNVLVRALKYLRSDDKEWSASQKQIIQSLEQSGDVLDVLAGLDPDRTIPPYEDQNNRRPPEDQTLYLNPKALSSEYGEKWKSWANKFAGAYPLLTEDLTEILKNTDRKSRIKIRSDVLPDSDYRLAYILQRAFDRSIALDECSIRRTAEDFENGVVIKNEKLEDVLSGHQLEEFLEFANRYYQETAKAKNGLWFPENALLERADLHPPMKNKILNVIVGQALGVSPAEGTDFIEEIWNSKVKGRSTVRSICNAIENERKTYGPYFSEDYKFVKTALKEGKTEKELSKKFAAVIKVLKMVSEVVPFIGKELRLSDEAQSKFDNLYSLAQLYNLIETERNGFSKVSLAAHLENAWRMTMTDGSAQCCRLPADCVRPFDGFIRKAIDRNSWEVAKRIAEEVKKSVDFTNGTVKIPVAIEANSFNFTASLTDLKYIQLKEQKLKKKLEDIQRNEENQEKRWLSKEERIRADSHGICAYTGRPLDDVGEIDHIIPRSLTLKKSESIYNSEVNLIFVSAQGNQEKKNNIYLLSNLAKNYLAAVFGTSDLSQITNEIESTVLQLKAAGRLGYFDLLSEKERACARHALFLNSDSEARRAVIDVLGSRRKASVNGTQAWFVRSIFSKVRQALAAWTQETGNELIFDAISVPAADSSEMRKRFAEYRPEFRKPKVQPVASHSIDAMCIYLAACSDPFKTKRMGSQLAIYEPINFDNLFTGSCQVIQNTPRNFSDKTNIANSPIFKETIYAERFLDIIVSRGEIFIGYPSNMPFEEKPNRISIGGKDPFSILSVLGAYLDKAPSSEKEKLTIYRVVKNKAFELFSKVAGSKFTAEEDKAAKILEALHFVTVKQDVAATVSDLIKSKKELSKDSIENLAKQKGCLKKVEYSSKEFKFKGSLIIPAAVEWGKVLWNVFKENTAEELKDENALRKALEAAWPSSFGTRNLHSKAKRVFSLPVVATQSGAVRIRRKTAFGDFVYQSQDTNNLYSSFPVKNGKLDWSSPIIHPALQNRNLTAYGYRFVDHDRSISMSEFREVYNKDDLMRIELAQGTSSRRYLRVEMPGEKFLAWFGENSISLGSSFKFSVSEVFDNKIYTENAEFTKFLPKPREDNKHNGTIFFELVGPRVIFNYIVGGAASSLKEIFSEAGKERS

SEQ ID NO: 377 - protein, 1037 aa, Parvibaculum lavamentivorans
MERIFGFDIGTTSIGFSVIDYSSTQSAGNIQRLGVRIFPEARDPDGTPLNQQRRQKRMMRRQLRRRRIRRKALNETLHEAGFLPAYGSADWPVVMADEPYELRRRGLEEGLSAYEFGRAIYHLAQHRHFKGRELEESDTPDPDVDDEKEAANERAATLKALKNEQTTLGAWLARRPPSDRKRGIHAHRNVVAEEFERLWEVQSKFHPALKSEEMRARISDTIFAQRPVFWRKNTLGECRFMPGEPLCPKGSWLSQQRRMLEKLNNLAIAGGNARPLDAEERDAILSKLQQQASMSWPGVRSALKALYKQRGEPGAEKSLKFNLELGGESKLLGNALEAKLADMFGPDWPAHPRKQEIRHAVHERLWAADYGETPDKKRVIILSEKDRKAHREAAANSFVADFGITGEQAAQLQALKLPTGWEPYSIPALNLFLAELEKGERFGALVNGPDWEGWRRTNFPHRNQPTGEILDKLPSPASKEERERISQLRNPTVVRTQNELRKVVNNLIGLYGKPDRIRIEVGRDVGKSKREREEIQSGIRRNEKQRKKATEDLIKNGIANPSRDDVEKWILWKEGQERCPYTGDQIGFNALFREGRYEVEHIWPRSRSFDNSPRNKTLCRKDVNIEKGNRMPFEAFGHDEDRWSAIQIRLQGMVSAKGGTGMSPGKVKRFLAKTMPEDFAARQLNDTRYAAKQILAQLKRLWPDMGPEAPVKVEAVTGQVTAQLRKLWTLNNILADDGEKTRADHRHHAIDALTVACTHPGMTNKLSRYWQLRDDPRAEKPALTPPWDTIRADAEKAVSEIVVSHRVRKKVSGPLHKETTYGDTGTDIKTKSGTYRQFVTRKKIESLSKGELDEIRDPRIKEIVAAHVAGRGGDPKKAFPPYPCVSPGGPEIRKVRLTSKQQLNLMAQTGNGYADLGSNHHIAIYRLPDGKADFEIVSLFDASRRLAQRNPIVQRTRADGASFVMSLAAGEAIMIPEGSKKGIWIVQGVWASGQVVLERDTDADHSTTTRPMPNPILKDDAKKVSIDPIGRVRPSND

SEQ ID NO: 378 - protein, 1058 aa, Pasteurella multocida
  Pasteurella multocida subsp. gallicida X73
MQTTNLSYILGLDLGIASVGWAVVEINENEDPIGLIDVGVRIFERAEVPKTGESLALSRRLARSTRRLIRRRAHRLLLAKRFLKREGILSTTDLEKGLPNQAWELRVAGLERRLSAIEWGAVLLHLIKHRGYLSKRKNESQTNNKELGALLSGVAQNHQLLQSDDYRTPAELALKKFAKEEGHIRNQRGAYTHTFNRLDLLAELNLLFAQQHQFGNPHCKEHIQQYMTELLMWQKPALSGEAILKMLGKCTHEKNEFKAAKHTYSAERFVWLTKLNNLRILEDGAERALNEEERQLLINHPYEKSKLTYAQVRKLLGLSEQAIFKHLRYSKESAESATFMELKAWHAIRKALENQGLKDTWQDLAKKPDLLDEIGTAFSLYKTDEDIQQYLEGKLPDSVINALLVSLNFDKFIELSLKSLRKILPLMEQGKRYDQACHEIYGHHYGEKNQQISQLLPVIPTQEIRNPVVLRTLSQARKVINAIIRQYGSPARVHIETGRELGKSFKERREIQKQQEDNRTKRESAVQKFKELFSDFSSEPKSKDILKFRLYEQQHGKCLYSGKEINIHRLNEKGYVEIDHALPFSRTWDDSFNNKVLVLASENQNKGNQTPYEWLQGKINSERWKNFVALVLGSQCSAAKKQRLLTQVIDDNKFIDRNLNDTRYIARFLSNYIQENLLLVGKNKKNVFTPNGQITALLRSRWGLIKVRENNDRHHALDAIVVACATPSMQQKITRFIRFKEVHPYKIENRYEMVDQESGEIISPHFPEPWAYFRQEVNIRVFDNHPDTVLKEMLPDRPQANHQFVQPLFVSRAPTRKMSGQGHMETIKSAKRLAEGISVLRIPLTQLKPNLLENMVNKEREPALYVGLKARLAEFNQDPAKAFATPFYKQGGQQVKAIRVELVQKSGVLVRQGNGVADNAPGSIVRTDVFIKNNKFFLVPIYTWQVAKGILPNKAIVAHKNEDEWEEMDEGAKFKFSIFPNDLIELRTKTECFLGYYIGPDRHNGSISLREHDSEISKGNAGVYRVGVKLALSLEKYHIDELGKNRRICRPHQRRPVR

SEQ ID NO: 379 - protein, 1056 aa, Pasteurella multocida
  Pasteurella multocida subsp. multocida str. P52VAC
MQTTNLSYILGLDLGIASVGWAVVEINENEDPIGLIDVGVRIFERAEVPKTGESLALSRRLARSTRRLIRRRARRLLLAKRFLKREGILSTTDLEKGLPNQAWELRVAGLERRLSAIEWGAVLLHLIKHRGYLSKRKNESQTNNKELGALLSGVAQNHQLLQSDDYRTPAELALKKFAKEEGHIRNQRGAYTHTFNRLDLLAELNLLFAQQHQFGNPHCKEHIQQYMTELLMWQKPALSGEAILKMLGKCTHEKNEFKAAKHTYSAERFVWLTKLNNLRILEDGAERALNEEERQLLINHPYEKSKLTYAQVRKLLGLSEQAIFKHLRYSKENAESATFMELKAWHAIRKALENQGLKDTWQDLAKKPDLLDEIGTAFSLYKTDEDIQQYLTNKVPNSVINALLVFLNFDKFIELALKSLRKILPLMEQGKRYDQACREIYGHHYGEANQKTSQLLPAIPAQEIRNPVVLRTLSQARKVINAIIRQYGSPARVHIETGRELGKSFKERREIQKQQEDNRTKRESAVQKFKELFSDFSSEPKSKDILKFRLYEQQHGKCLYSGKEINIHRLNEKGYVEIDHALPFSRTWDDSFNNKVLVLASENQNKGNQTPYEWLQGKINSERWKNFVALVLGSQCSAAKKQRLLTQVIDDNKFIDRNLNDTRYIARFLSNYIQENLLLVGKNKKNVFTPNGQITALLRSRWGLIKIRENNDRHHALDAIVVACATPSMQQKITRFIRFKEVHPYKIENRYEMVDQESGEIISPHFPEPWAYFRQEVNIRVFDNHPDTVLKEMLPDRPQANHQFVQPLFVSRAPTRKMSGQGHMETIKSAKRLAEGISVLRIPLTQLKPNLLENMVNKEREPALYAGLKARLAEFNQDPAKAFTTPFYKQGGQQVKAIRVEQVQKSGVLVRENNGVADNASIVRTDVFIKNNKFFLVPIYTWQVAKGILPNKAIVAHKNEDEWEEMDEGAKFKFSLFPNDLVELKTKKEYFFGYYIGLDRATGNISLKEHDGEISKGKDGVYRVGVKLALSFEKYQVDELGKNRQICRPQQRQPVR

SEQ ID NO: 380 - protein, 1056 aa, Pasteurella multocida
MQTTNLSYILGLDLGIASVGWAVVEINENEDPIGLIDVGVRIFERAEVPKTGESLALSRRLARSTRRLIRRRAHRLLLAKRFLKREGILSTIDLEKGLPNQAWELRVAGLERRLSAIEWGAVLLHLIKHRGYLSKRKNESQTNNKELGALLSGVAQNHQLLQSDDYRTPAELALKKFAKEEGHIRNQRGAYTHTFNRLDLLAELNLLFAQQHQFGNPHCKEHIQQYMTELLMWQKPALSGEAILKMLGKCTHEKNEFKAAKHTYSAERFVWLTKLNNLRILEDGAERALNEEERQLLINHPYEKSKLTYAQVRKLLGLSEQAIFKHLRYSKENAESATFMELKAWHAIRKALENQGLKDTWQDLAKKPDLLDEIGTAFSLYKTDEDIQQYLTNKVPNSVINALLVSLNFDKFIELSLKSLRKILPLMEQGKRYDQACREIYGHHYGEANQKTSQLLPAIPAQEIRNPVVLRTLSQARKVINAIIRQYGSPARVHIETGRELGKSFKERREIQKQQEDNRTKRESAVQKFKELFSDFSSEPKSKDILKFRLYEQQHGKCLYSGKEINIHRLNEKGYVEIDHALPFSRTWDDSFNNKVLVLASENQNKGNQTPYEWLQGKINSERWKNFVALVLGSQCSAAKKQRLLTQVIDDNKFIDRNLNDTRYIARFLSNYIQENLLLVGKNKKNVFTPNGQITALLRSRWGLIKARENNNRHHALDAIVVACATPSMQQKITRFIRFKEVHPYKIENRYEMVDQESGEIISPHFPEPWAYFRQEVNIRVFDNHPDTVLKEMLPDRPQANHQFVQPLFVSRAPTRKMSGQGHMETIKSAKRLAEGISVLRIPLTQLKPNLLENMVNKEREPALYAGLKARLAEFNQDPAKAFATPFYKQGGQQVKAIRVEQVQKSGVLVRENNGVADNASIVRTDVFIKNNKFFLVPIYTWQVAKGILPNKAIVAHKNEDEWEEMDEGAKFKFSLFPNDLVELKTKKEYFFGYYIGLDRATGNISLKEHDGEISKGKDGVYRVGVKLALSFEKYQVDELGKNRQICRPQQRQPVR

SEQ ID NO: 381 - protein, 1364 aa, Pediococcus acidilactici
  Pediococcus acidilactici DSM 20284
MGDRKYNLGLDIGTSSIGFAAVDENNQPIRVKGKTAIGVRLFEEGKTAADRRGFRTTRRRLSRRRWRINLLNEIFDAHLAEVDPTFLARLKESNRSNLDPKKSFQGSLLFPERKDYQFYEEYPTIYHLRKALMEKDRKFDFREIYLAVHHIIKYRGNFLNGTPMRSFKVENIELDTLFDQLNQLYAEIVPDNELAFDLAQVADVKDVLSSTTIYKMDKKKQLVKMMLLPASNKALQSENKKIVTQFVNAILNYKFKLDVLLQVETDADWSLKLNDEGADDKLEEFTGDLDENRLEIIDLLQRLHNWFSLNEITKDGNSLSAAMVEKYENHHHHLGLLKKVIENHPDAKKAKALKETYTAYVGKTDDKTQNQDDFYKAVEKNLDDSPDAKEIKRLIQLDQFMPKQRTGQNGAIPHQLHQQELDQIIEKQSKYYPFLAEPNPNVKRRKDAPYKLDELIAFKIPYYVGPLVTPEEQAQNGENVFAWMKRKAAGPITPWNFDEKVDRMESANRFIRRMTTKDTYLFGEDVLPAESMIYQKFVVLNELNNLKINGRHLSLKDKQDVYNDLFKQQKTVSIKALQNYYVTKKKAATAPTVGGLADPKKFLSSLSTYIDFKNMFGERVNDPQFQEDLEQIVEWSTIFEDRGIFKAKLQALGWLSEKQIQQLVAKRYKGWGRLSKKLLTGLKNAEGYSILDEMWRSTGNFMQIQSRPEFAALIQQANEKQFEGNDPDNVWENIENILGDAYTSPQNKKAIRQVVKVVQDIEKAVGNPPEKIAIEFTREAAANPQRTQSRLRTLEKLYESAEEVVDAGLTAELAEFKENKHVLSDKYYLYFTQLGRDVYTGDTISLDKLNDYDVDHILPQSFIKDDSLDNRVLTIRAVNNGKSDNVPAKMFGKKMGSFWRYLLDNGMISKRKYNNLITDPDNISKYAQKGFINRQLVETSQVIKLTANILNGIYDKDTEIIEVPAKMNSQMRKMFDLVKVREVNDYHHAFDAYLTIFIGNYLYKCYPKLQPYFVYDNFKKFGNKEDIGHKRFNFLGKIEREKKVVAPETGEILWSNVAPNETIKQIKKVYDYKFMIVSREITTRRAELFNQTVYPKNYHGKLIPIKEDRPTDLYGGYSGNTDAYLAIVALEDKKKGKYFKVVGIPTRVAAKLEKLKQQDSQQYLQALHKVIAPQFTKSTKKGIKKTEFEIVLDKVHYRQLVQDGPVKMMLGSSTYKYNAKQLVLSEKALQVIADDRKFDETQKDDNLIAVYDEILSIVNQSFDLYDINGFRKKLNDNRDQFIDLPAETKYEGRKVVAHGKREMILEILKGLHANAAFGNLKPIGFSTAFGQLQVPNGIILSKNAILIHQSPSGLFERKIKLSDL

SEQ ID NO: 382 - protein, 1366 aa, Pediococcus acidilactici
  Pediococcus acidilactici MA18/5M
MGDRKYNLGLDIGTSSIGFAAVDENNQPIRVKGKTAIGVRLFEEGKTAADRRGFRTTRRRLSRRRWRINLLNEIFDAHLAEVDPTFLARLKESNRSNLDPKKSFQGSLLFPERKDYQFYEEYPTIYHLRKALMEEDRKFDIREIYLAVHHIIKYRGNFLNGTPMRSFKVENIELDTLFDQLNQLYAEIVPDNELAFDLAQVADVKDVLSSTTIYKMDKKKQLVKMMLLPASNKALQSENKKIVTQFVNAILNYKFKLDVLLQVETDADWSLKLNDEGADDKLEEFTGDLDENRLEIIDLLQRLHNWFSLNEITKDGNSLSAAMVEKYENHHHHLGLLKKVIENHPDAKKAKALKETYTAYVGKTDDKTQNQDDFYKAVEKNLDDSPDAKEIKRLIQLDQFMPKQRTGQNGAIPHQLHQQELDQIIEKQSKYYPFLAEPNPNVKRRKDAPYKLDELIAFKIPYYVGPLVTPEEQAQNKENVFAWMKRKAAGPITPWNFDEKVDRMESANRFIRRMTTKDTYLFGEDVLPAESMIYQKFVVLNELNNLKINGRHLSLKDKQDVYNDLFKQQKTVSIKALQNYYVTKKKAATAPTVGGLADPKKFLSSLSTYIDFKNMFGERVNDPQFQEDLEQIVEWSTIFEDRGIFKAKLQALGWLSEKQIQQLVAKRYKGWGRLSKKLLTGLKNAEGYSILDEMWRSTENFMQIQTRPEFAALIQQANEKQFEGNDPNNVWENIESILGDAYTSPQNKKAIRQVVKVVQDIEKAVGNPPEKIAIEFTREAAANPQRTQSRLRTLEKLYESAEEVVDAGLTAELAEFKENKHVLSDKYYLYFTQLGRDVYTGDTISLDKLNDYDVDHILPQSFIKDDSLDNRVLTIRAVNNGKSDNVPAKMFGKKMGSFWRYLLDNGMISKRKYNNLITDPDNISKYAQKGFINRQLVETSQVIKLTANILNGIYDKDTEIIEVPAKMNSQMRKMFDLVKVREVNDYHHAFDAYLTIFIGKYLYKCYPKLRPYFVYGKFKKFGDNEDIEVGDGRFNFLNRIERLKNVTDPETGEILWSNVAPNETIKQIKKVYNYKFMLVSRETTTRRAELFNQTVYPKNYRGKLIPIKEDRPTDLYGGYSGNTDAYLAIVALEDKKKGKYFKVVGIPTRAAAKLEKLKQQDSQQYLQALHKVIAPQFTKSTKKGIKKTEFEIVLDKVHYRQLVQDGPVKMMLGSSTYKYNAKQLVLSEKALQVIADDRKFDETQKDDNLIAVYDEILSIVNQSFDLYDINGFRKKLNDNRDQFIDLPAETKYEGRKVVAHGKREMILEILKGLHANAAFGNLKPIGFSTAFGQLQVPNGIILSKNAILIHQSPSGLFERKIKLSDL

SEQ ID NO: 383 - protein, 1364 aa, Peptoniphilus duerdenii
  Peptoniphilus duerdenii ATCC BAA-1640
MKNLKEYYIGLDIGTASVGWAVTDESYNIPKFNGKKMWGVRLFDDAKTAEERRTQRGSRRRLNRRKERINLLQDLFATEISKVDPNFFLRLDNSDLYREDKDEKLKSKYTLFNDKDFKDRDYHKKYPTIHHLIMDLIEDEGKKDIRLLYLACHYLLKNRGHFIFEGQKFDTKNSFDKSINDLKIHLRDEYNIDLEFNNEDLIEIITDTTLNKTNKKKELKNIVGDTKFLKAISAIMIGSSQKLVDLFEDGEFEETTVKSVDFSTTAFDDKYSEYEEALGDTISLLNILKSIYDSSILENLLKDADKSKDGNKYISKAFVKKFNKHGKDLKTLKRIIKKYLPSEYANIFRNKSINDNYVAYTKSNITSNKRTKASKFTKQEDFYKFIKKHLDTIKETKLNSSENEDLKLIDEMLTDIEFKTFIPKLKSSDNGVIPYQLKLMELKKILDNQSKYYDFLNESDEYGTVKDKVESIMEFRIPYYVGPLNPDSKYAWIKRENTKITPWNFKDIVDLDSSREEFIDRLIGRCTYLKEEKVLPKASLIYNEFMVLNELNNLKLNEFLITEEMKKAIFEELFKTKKKVTLKAVSNLLKKEFNLTGDILLSGTDGDFKQGLNSYIDFKNIIGDKVDRDDYRIKIEEIIKLIVLYEDDKTYLKKKIKSAYKNDFTDDEIKKIAALNYKDWGRLSKRFLTGIEGVDKTTGEKGSIIYFMREYNLNLMELMSGHYTFTEEVEKLNPVENRELCYEMVDELYLSPSVKRMLWQSLRVVDEIKRIIGKDPKKIFIEMARAKEAKNSRKESRKNKLLEFYKFGKKAFINEIGEERYNYLLNEINSEEESKFRWDNLYLYYTQLGRCMYSLEPIDLADLKSNNIYDQDHIYPKSKIYDDSLENRVLVKKNLNHEKGNQYPIPEKVLNKNAYGFWKILFDKGLIGQKKYTRLTRRTPFEERELAEFIERQIVETRQATKETANLLKNICQDSEIVYSKAENASRFRQEFDIIKCRTVNDLHHMHDAYLNIVVGNVYNTKFTKNPLNFIKDKDNVRSYNLENMFKYDVVRGSYTAWIADDSEGNVKAATIKKVKRELEGKNYRFTRMSYIGTGGLYDQNLMRKGKGQIPQKENTNKSNIEKYGGYNKASSAYFALIESDGKAGRERTLETIPIMVYNQEKYGNTEAVDKYLKDNLELQDPKILKDKIKINSLIKLDGFLYNIKGKTGDSLSIAGSVQLIVNKEEQKLIKKMDKFLVKKKDNKDIKVTSFDNIKEEELIKLYKTLSDKLNNGIYSNKRNNQAKNISEALDKFKEISIEEKIDVLNQIILLFQSYNNGCNLKSIGLSAKTGVVFIPKKLNYKECKLINQSITGLFENEVDLLNL

SEQ ID NO: 384 - protein, 1087 aa, Phascolarctobacterium succinatutens
  Phascolarctobacterium succinatutens YIT 12067
MLRMKYAIGLDIGIASVGYAVLALDHEENPWGIIRLGSRIFDVAENPKDGASLALPRREARSVRRRLRRHHHRLERIKNLLINTEFITKDELLHLYDGNLSDVYELRVKALDYSVTNAELTRILLHLAQRRGFKSNRKSDANDKEAGQLLEAVSANAKRMQENHYRTVGEMFYKDDLFSKYKRNKGGTYLTTVHRDMIAAEARTILEKQFALGNNICTQDFIDKYLSILLSQRQFDEGPGEPSPYAGNQIANMIGKCTFEPNEYRAAKASYSFERFNLLQKVNHLRLLLEGKSIALDNEQRKKIIALAHDKADLRYSHIRKALGLDEKVLFNTITYNDDVSVIEKKTKFNFLQAYHQIKKVLAEDMQKLTTEQLDNIGQILSTYKSDNKRTEELSALGLEKKIIDALLGINGLSKFAHLSLKALRKINPYLEEGKIYNEACTAAGYDFKAHANTQKTELLPAYKEEMDDITSPVARRAIAQSIKVINAIIREQKGSPLYINIELAREMAKGFDERTQIDKANKENQAKNERIMERIRTEFHKANPTGMDLIKLKLWEEQDGRSPYSQKAISINRLFEPGYVDIDHIVPYSISFDDSFKNKVLVFSDENRDKGNRLPIAYLQSKFGAKAAENFMIWVQSNIKDYKKRQKLLKREITEEDINKFKERNLQDTKTISRFLYNYINDYLLFAPSDTGKKKRVTAVNGTITAYLRKRWGINKIRANGDKHHAVDAVVIACTTDKMIKDLSSFSRYHELEYTHTDTESFLVNSLTGEILKRFPYPWEDFRPELMARLSDNPADALRKLNLIFYHGIDLSTIKPIFVSRMPRHKVTGAAHKATIKSARCLDNGIVICKTSLQNLKLDKEGEIANYYAPESDTILYNALKERLRSYDNKPAKAFAEPFYKPKADGTPGPLVKKVKVYEKSTLNVAVQQNTAVADNDSMVRVDVFHVKGNGYYLVPIYIADTLKKELPNKAIVAYKPYADWPVMDDSNFIFSLYPNDLIKFEHKNSVKFAKVNKESTLNDFYSTKSEIVYFKGCNINTGAITIINHENTYVVSSLGVKTLPSLEKYQADVLGNYTKVKKEVRKPFR

SEQ ID NO: 385 - protein, 1333 aa, Planococcus antarcticus
  Planococcus antarcticus DSM 14505
MKNYTIGLDIGVASVGWVCIDENYKILNYNNRHAFGVHEFESAESAAGRRLKRGMRRRYNRRKKRLQLLQSLFDSYITDSGFFSKTDSQHFWKNNNEFENRSLTEVLSSLRISSRKYPTIYHLRSDLIESNKKMDLRLVYLALHNLVKYRGHFLQEGNWSEAASAEGMDDQLLELVTRYAELENLSPLDLSESQWKAAETLLLNRNLTKTDQSKELTAMFGKEYEPFCKLVAGLGVSLHQLFPSSEQALAYKETKTKVQLSNENVEEVMELLLEEESALLEAVQPFYQQVVLYELLKGETYVAKAKVSAFKQYQKDMASLKNLLDKTFGEKVYRSYFISDKNSQREYQKSHKVEVLCKLDQFNKEAKFAETFYKDLKKLLEDKSKTSIGTTEKDEMLRIIKAIDSNQFLQKQKGIQNAAIPHQNSLYEAEKILRNQQAHYPFITTEWIEKVKQILAFRIPYYIGPLVKDTTQSPFSWVERKGDAPITPWNFDEQIDKAASAEAFISRMRKTCTYLKGQEVLPKSSLTYERFEVLNELNGIQLRTTGAESDFRHRLSYEMKCWIIDNVFKQYKTVSTKRLLQELKKSPYADELYDEHTGEIKEVFGTQKENAFATSLSGYISMKSILGAVVDDNPAMTEELIYWIAVFEDREILHLKIQEKYPSITDVQRQKLALVKLPGWGRFSRLLIDGLPLDEQGQSVLDHMEQYSSVFMEVLKNKGFGLEKKIQKMNQHQVDGTKKIRYEDIEELAGSPALKRGIWRSVKIVEELVSIFGEPANIVLEVAREDGEKKRTKSRKDQWEELTKTTLKNDPDLKSFIGEIKSQGDQRFNEQRFWLYVTQQGKCLYTGKALDIQNLSMYEVDHILPQNFVKDDSLDNLALVMPEANQRKNQVGQNKMPLEIIEANQQYAMRTLWERLHELKLISSGKLGRLKKPSFDEVDKDKFIARQLVETRQIIKHVRDLLDERFSKSDIHLVKAGIVSKFRRFSEIPKIRDYNNKHHAMDALFAAALIQSILGKYGKNFLAFDLSKKDRQKQWRSVKGSNKEFFLFKNFGNLRLQSPVTGEEVSGVEYMKHVYFELPWQTTKMTQTGDGMFYKESIFSPKVKQAKYVSPKTEKFVHDEVKNHSICLVEFTFMKKEKEVQETKFIDLKVIEHHQFLKEPESQLAKFLAEKETNSPIIHARIIRTIPKYQKIWIEHFPYYFISTRELHNARQFEISYELMEKVKQLSERSSVEELKIVFGLLIDQMNDNYPIYTKSSIQDRVQKFVDTQLYDFKSFEIGFEELKKAVAANAQRSDTFGSRISKKPKPEEVAIGYESITGLKYRKPRSVVGTKR

SEQ ID NO: 386 - protein, 1197 aa, Porphyromonas sp.
  Porphyromonas sp. oral taxon 279 str. F0450
MLMSKHVLGLDLGVGSIGWCLIALDAQGDPAEILGMGSRVVPLNNATKAIEAFNAGAAFTASQERTARRTMRRGFARYQLRRYRLRRELEKVGMLPDAALIQLPLLELWELRERAATAGRRLTLPELGRVLCHINQKRGYRHVKSDAAAIVGDEGEKKKDSNSAYLAGIRANDEKLQAEHKTVGQYFAEQLRQNQSESPTGGISYRIKDQIFSRQCYIDEYDQIMAVQRVHYPDILTDEFIRMLRDEVIFMQRPLKSCKHLVSLCEFEKQERVMRVQQDDGKGGWQLVERRVKFGPKVAPKSSPLFQLCCIYEAVNNIRLTRPNGSPCDITPEERAKIVAHLQSSASLSFAALKKLLKEKALIADQLTSKSGLKGNSTRVALASALQPYPQYHHLLDMELETRMMTVQLTDEETGEVTEREVAVVTDSYVRKPLYRLWHILYSIEEREAMRRALITQLGMKEEDLDGGLLDQLYRLDFVKPGYGNKSAKFICKLLPQLQQGLGYSEACAAVGYRHSNSPTSEEITERTLLEKIPLLQRNELRQPLVEKILNQMINLVNALKAEYGIDEVRVELARELKMSREERERMARNNKDREERNKGVAAKIRECGLYPTKPRIQKYMLWKEAGRQCLYCGRSIEEEQCLREGGMEVEHIIPKSVLYDDSYGNKTCACRRCNKEKGNRTALEYIRAKGREAEYMKRINDLLKEKKISYSKHQRLRWLKEDIPSDFLERQLRLTQYISRQAMAILQQGIRRVSASEGGVTARLRSLWGYGKILHTLNLDRYDSMGETERVSREGEATEELHITNWSKRMDHRHHAIDALVVACTRQSYIQRLNRLSSEFGREDKKKEDQEAQEQQATETGRLSNLERWLTQRPHFSVRTVSDKVAEILISYRPGQRVVTRGRNIYRKKMADGREVSCVQRGVLVPRGELMEASFYGKILSQGRVRIVKRYPLHDLKGEVVDPHLRELITTYNQELKSREKGAPIPPLCLDKDKKQEVRSVRCYAKTLSLDKAIPMCFDEKGEPTAFVKSASNHHLALYRTPKGKLVESIVTFWDAVDRARYGIPLVITHPREVMEQVLQRGDIPEQVLSLLPPSDWVFVDSLQQDEMVVIGLSDEELQRALEAQNYRKISEHLYRVQKMSSSYYVFRYHLETSVADDKNTSGRIPKFHRVQSLKAYEERNIRKVRVDLLGRISLL

SEQ ID NO: 387 - protein, 1485 aa, Prevotella bivia
  Prevotella bivia JCVIHMP010
MKNILGLDLGTNSIGWAKISIDDNGKYIKDSIKLGSRIIPMSQDVLSNFSKGVTLSQTSERTSFRGARRLRERTLLRRERLHRILHLLGFLPKHYEKAIGWDRNDNKTYGKFINHAEPKLAWCKDNNGKMRFLFMDSFHDMLSEFSEKHPELLANGKKIPLDWTIYYLRKKALYKAITKEELAWILLNFNQKRGYYQLRGEEDRDSEANKKEYLELKVIGVEATGEKKGNDIWYNIHLENGWIYRRSSKNPLNDWLGKVKSFIVTTDLDADGNPKKDKDGNIKRSFRAPSEGDWTLIKKRTESLLENSGQTVGQFIYNHILEEPSAKIRGNFIRTIERKYYKDELKAILEKQKEFHHELSSESLLTECAKELYKRNIAHQEVLLKKGIIHLLLNDILFYQRPLKIKKSLIDNCPYENYKYVDKKSGDIKVKSIKCIAKSNPFFQEFRLWQFVSNLRLYRKSDDKDVTSEHLVTTDDYANLFTYLNNRKDIKQSVLLKEYFKIKKVKTINGAEYPVRWNYIDDDNKTYPCNETRYDILHALSKTELKSEWLTPERTYRLWHLLYSIESKEETKKALNKLNLSDDFTEAFLTIKPFKKEYGSYSEKAIKKLLSLMRMGYLWSEDEAIKQVGAEIEKTIEGELPDYVLQRLEKSQHNYNKISDFSGLPLWLASYIIYGRHSEAKEIIHWDNPESMMAYIKDFRQHSMRNPIVEQCVLETLRTVHDIWKEIGHIDEIHIELGREMKSTSEQRKAITQNVLHNQNTNIRIKLLLQELKNDNNITGVRPYSPMQQEILRIYEEGALQGLTKEDKDYNDILKISQTAQPTSNELTRYKLWLEQKYRSPYTGKAISLSKLFTSAYQIEHVIPQSRYFDDSLSNKVICESEVNTLKKAMLGMEFIKTCGGQKVHCTLLGDVEIYNEEDYKAFVNEHYSNNRTKRNKLLMEDIPQEFINRQLNDSRYISKMVKQLLSAIVRGQEEVEATSKFVIPCTGGITDRLKKDWGLNDIWNNLVSPRFQRMNALTGSEYFGHWENKEGKRVFQTTMPIQLQQGFSKKRIDHRHHAMDALVIACASRNIISYLNNETAQDTERRRDLRQKLCDKGGSVRKPWDSFTQDTQYALKDIIVTFKNYVRIINKATNYYEHYKTDGKKGMISQKGDELWAIRKPMHKETVFGKVNLRRPKRVSLSKAIDSVDIICNRKLKKYIKARLNEGLQKKQILNIFKELNNVWEGIDVNKIDIWEMSNDKEPMVATRKQLDTSFDEKKIRSISDTGIQKILLNYLITKNNNPELAFTPEGIQEMNSNISEYNDHKKHQPIYKVRVTEPLGAKYPIGTMGNNPKKFVEAQAGTNLYFAIYEDKEGKRNYDTIPLNIAAERLNQQLSPVPETNENNTPLKFYLSPNDLVYVPSEEERHSGNNIQLDKNRIYKMVSSTSKRCFFIHHRVAISLVDKKEFSAQNKMERSIDNEQVMIKSVCWKLITDRLGNIIKVIK

SEQ ID NO: 388 - protein, 1457 aa, Prevotella buccae
  Prevotella buccae ATCC 33574
MKTILGLDLGTNSIGWAKVSVDDYGNYLHDIKLGSRIIPMSQDVLGNFDSGVTVSQTAQRTEFRSKRRLVQRNLQRRERLHRVLHVLDFLPAHYDAAIGWDRTEAVTYGKFLNHAEPKLAWEELGNGKRRFLFMDSFHEMVADFARCQPALVADGKKIPLDWTIYYLRKKALTQAITKEELAWILLNFNQKRGYYQLRGEEEEENPTKQEEYYELKVVSVEATDSRKGNDTWYNVHLENGWIYRRSSKISLDDWVGKVKQFIVTTEYEKDGATLKTDKEGYVKRSFRAPNENDWGLRKKRTETLLEMSGKTVGAFIYDHLLQEPADKIRGNFIRTIERHYYKAELEAILAEQCKYHIELRDKEMLEACARELYLNNLPHQRSLMKKDMTYLLLYDLIFYQRPLKSKKALIANCPYEYYEYVDKETGEIKRQNIKCIAKSNPYFQEFRLWQFVLNLRLFDRVEDKEVTANYLPTADDHARLFTYLNDRKEINQETLLKDYFKLKKVKIGNEKEYPIRWNYIEDKEKKYPCNETRYELLMALDRAGIEHKWLDDNNLEYRLWHLLYSVEVKSESETALRKLKNDDAFVNSFLKVKPFKKEYGAYSEKAIKRLLAVMRKGFLWNEQDICDETRKRIEIIIKGDVDEKVKERMGHAAYSFDRVSDFQGLPEWLACYVVYGRHSEAMDIQHWDSPERLMAYINNFKQYSLRNPIVEQCILETLRTVHDIWKETGQIDEIHVELGREMKSTSEERARRTQNVLRNENTNLRIKSLLIELKNDTDICNVHPYSPMQQEILRIYEEGALQELNREDEDFEEISKISQMSQPSGKELNRYKLWLEQKYRSPYTGKAISLAKLFTPAYQIEHVIPQSRYFDDSFTNKVICEAEVNTLKSNLLGYEFIKKHGGEIIHCTTLGDVRIFSESEYKAFVMDHYANNKSKKDKLLMEDIPQEFLSRQMNDSRYISKVVKTLLSNIVRMADESEATSKSVIVCTGGVTDRLKKDWGLNDVWNSIVYSRFERLNRLTGTEAFGHWENKDGKRVFQTSMPLELQRGFRKKRIDHRHHAMDALVIACASRNIVNYLNNESANNPKKREDLRRQLCDKNRVIRKPWETFTQDAYNALENVVVSFKNYVRVINKATNRYEHYDENGKKRFVQQKGSELWAIRKPMHKETYYGHVNLRRKELVTLQKALDDIPSICDKKLRDYISALVEKHFNKRQLLAHFKSTDYYWQKQYVNKVYVWTFSDDIKPLVATRKLLDTSFDAKRIGTITDTGIQKILRNYLEAKGGNATLAFTPEGIAEMNQNISKYNDGKPHQPILKVRITEPMGAKYRVGQTGNKMAKYVEAQSGTNLYFAIYEDSEGKRSYTTVPLDEVAERLKQRLSPVPEKDENDVPLKFYLSPNDLVYVPTEEELQLRECKLNKDRIYKMVSSTGNECHFIPYYVANVIYNKGGFNMQMHRPQS

SEQ ID NO: 389 - protein, 1218 aa, Prevotella buccalis
  Prevotella buccalis ATCC 35310
MNKRILGLDTGTNSLGWAVVDWDEHAQSYELIKYGDVIFQEGVKIEKGIESSKAAERSGYKAIRKQYFRRRLRKIQVLKVLVKYHLCPYLSDDDLRQWHLQKQYPKSDELMLWQRTSDEEGKNPYYDRHRCLHEKLDLTVEADRYTLGRALYHLTQRRGFLSNRLDTSADNKEDGVVKSGISQLSTEMEEAGCEYLGDYFYKLYHEQGNKVRIRQRYTDRKKHYQHEFDAICEKQELSSELIEDLQRAIFFQLPLKSQRHGVGRCTFERGKPRCADSHPDYEEFRMLCFVNNIQVKGPHDLELRPLTYEEREKIEHLFFRKSKPNFDFEDIAKELAGKKNYAWIHDKEERAYKFNYRMTQGVPGCPTTAQLKSIFGDDWKTGIAETYTLIQKKNGSKSLQEMVDDVWNVLYSFSSVEKLKEFAHHKLQLDEENAEKFAKIKLSHSFAALSLKAIRKFLPFLRKGMYYTHASFFANIPTIVGKEIWNNEQSRKYIMENVGELVFNYQPKHRDVQGTIEMLIKDFLANNFELPAGATDKLYHPSMIETYPHALRNEFGILQLGSPRTNAIRNPMAMRSLHVLRRVVNQLLKESIIDENTEVHVEYARELNDANKRRAIADRQKEQDKQHKKYGDEIRKLYKEETGKDIEPTQTDVLKFQLWEEQNHYCLYTGEQIGITDFIGSNPKFDIEHTIPQSVGGDSTQMNLTLCDNRFNREVKKAKLPTELANHEEILTRIEPWKNKYEQLVKERDKQRTFAGMDKAVKDIRIQKRHKLQMEIDYWRGKYERFTMTEVPEGFSRRQGTGIGLISRYAGLYLKSLFHQADSRNKSNVYVVKGVATAEFRKMWGLQSEYEKKCRDNHSHHCMDAITIACIGKREYDLMAEYYHMEETFRQGRGSKPKFSKPWATFTEDVLNIYKNLLVVHDTPNNMPKHTKKYVQTSKGKVLAQGDTARGSLHLDTYYGAIERDGEIRYVVRRPLSSFTNPKELENIVDETVKRTIKEAIADKNFKQAIAEPIYMNEDKGILIKKVRCFANSVKQPINIRQHRDLSKKEYKQQYHVMNENNYLLAIYEGLVKNKVVREFEIVSYIEAAKYYKRSQDRNIFSSIVPTHSTKYGLPLKTKLLMGQQVLMFEENPDEIQVDNTKDLVKRLYKVVGIEKDGRIKFKHHQEARKEGLTIYSTPYKNNDDYVPIFRQSIKNINILVDGIDFNIDILGKVTLKE

SEQ ID NO: 390 - protein, 1422 aa, Prevotella denticola
  Prevotella denticola CRIS 18C-A
MTQKVLGLDLGTNSIGSSVRNLDLSDDLKGQLEFFSSDIFRSSVNKESNGREYSLAAQRSAHSRSRGLNEARRRKLWATLDLLIKYGFCPMSPESLMRWRTYDKQRGLFREYPIDDKNFNAWILLDFDGDGKPDYSSPYQLRRELVIRQFDFDQPIERYKLGRALYHIAQHRGFKSSKGETLSQQETNSKQSLTDDTADVAGEMKASEEKLSKGLSTYMKENNLLTVGAAFAQLEDEGVRVRNNNDYRAIRSQFQREIETIFKFQQGLSVENELYERLVSEKKNIGTIFYKRPLRSQRGNVGKCTLERTKPRCAIGHPLFEKFRAWTLINNIKVRMSEEEQAEQLPMKLRFELYNDCFLAFVRAEFKFEDIRKYLEKRLGVHFSYNDKTINYKDSTSVAGCPITARFRKLLGEDWESFHVDGQKQRQAHGKNNASFHTVSYSTNDIWHFCYDAEEPEAVLSFAQDNLKWEKKKAEELVRIWSAIPQGYAMLSQKAIRNINKMLILGLKYSDAVLLAKVPEIVEITDGEILSVTEDYHRVEAQVGYEKQINNIVNALIAKYKSASEEYRFADHNYEYQLDKSDEKDIIKQIESNIGTRKWSLLDADEQTDILQKVRDKYQNFFRSHERKFVESPKLGECFEEYLMKKFPMVEGERWKKLYHPSQIAIYRPVPANKDRSALRLGNPDIGAIKNPTVLRVLNTLRKRVNQLLDDGIISPDETRVVVETARELNDANRKWALDTYNRIRHDENEKIKKILAEFYPKRDNISTVDIDKARYVIDQREMDYFTEAKTYHKDIKKYKLWLEQGGQCMYTGRTINLSNLFDPNSFDVEHTIPESISFDSSDMNLTLCDAHYNRFIKKNHIPADLPNYDKSVVIDGKEYSPIKPRLQRWADRVERLNRNVEYWRGQARRAQNKDRKDQCMREMHLWKMELEYWTKKLERFTITEVTDEFKNSQLVDTRVITRHAVLYLKSIFPHVDVQRGDVTAKFRKILGIQSVDEKKDRSLHSHHAIDATTLTIIPGAAKRERMLELFAKIEEVNKMLSFSGNEDRTGLKQELDGLKNQLNKEVKACRIGHNVSEIGTFINDNIIINHHVKNQALTPVRRRLRKRGHIVGGMDNPRWQTGDALRGEIHKASYYGAITQYAKDKEGKVLMKEGRPQINPTIKFVIRRELKYKKSSTDSGFASWDDLGKAIVDKELFALMKGQFPEGTSFKDACEQGIYMIKKGKNGEVDTKLYRIRHIRCKTKQKNALKIKEQAYKSEKEYKRYFYAAVGDLYAMCCYTNGKTREFKIYSLYDISCHRKVGVEDIPEFITDKKGNRLMLDYKLHTGDMILLYKENPEELYDLDNVSLSKLLYKINGFENDGLRIRMVNHLVAKEAMGESVKDYAKLPDIIRCGVKTIKFLVMGENRDFVIKNGKISFNHR

SEQ ID NO: 391 - protein, 1375 aa, Prevotella histicola
  Prevotella histicola F0411
MKKILGLDLGTTSIGWALVYESENTDEKSSIVRLGVRVNPLSVDEKGNFEKGKAITTNADRQQTHGARINLQRYKLRRENLKDCLQKQGWIGTEALCEEGKTSTFETYMLRAKAAEEEISLHELCRVLFMMNKKRGYKSNRKANNKEDGKLFDGMTVAKKLYEEHLTPAEYSFQLLSSGKKFKQEYYRSDLKEEFDRIWNEQQKYYPEILTDDFKQQLQGKSKGNTSKIFLGKYGIYSADLKGLDRKLQPLKWRVEALKQQVDKEVLAFVISDLNGQIASTSGLLGAISDRSKELYFNKQTVGQYLWTSLKETPHVSIKNKPFYRQDYLDEFEKIWETQATYHKELTPELKQEIRDIIIFYQRPLKSKKGLISVCELEQRKVKVTIDGKEKEISIGPKVAPKSSPMFQEFRIWQNLNNILLIDKGNNSIHPLYEEEKNLLYEELSVKEKLSKAEALKVLNKNSKQWDLNYKEIEGNRTQAVLYDCYNRIIVMTGHEEYNFKKLKASEIRSYVKTTFTGLGFNTDILEFDSSLTGHELEKQPMYQLWHLLYSYESDNSRTGNDALLRKLETAFGFPKEYAAVLSDVVFEDSYGNLSVKAMRKILPHLQAGLNYSQACEEAGYKHSRRSLTKNELDQKEYKEKLELLPKNSLHNPVVEKILNQMINVINAVIDEYGKPDEIRIELARELKIGAAERENMTRSINQGNAENKRIREILEKEFALSYISRNDIIKYKLYEELKSNGFKTLYSDTYISKDKLFSKDFDIEHIIPKARLFDDSLSNKTIEARDVNIAKSNKTAFDFISEKYDQQGIEAYKKKLDILLQDGSISKAKYNRLLMKEADIPSGFIDRDLRDTQYIAKKAYEILSDLVRNVTPTTGAVTSRLREDWQLVDVMKELNFEKYQKLGLVEVIEDRDGRKIKRIKDWTKRNDHRHHAMDALTIAFTKPSYIQYLNNLNARSDKNSSIYGIENKELHREDNKLRFNAPLPINEFRAEARRHLKSILVSVKAKNKVMTQNVNVIKTKHGVIKKVQLTPRGELHNATFYGTKKRPIIKMVKVGAALDEVTIKKVSSSFIREALLDRLHEYNGDAKKAFTGRNSIDKNPIYIDEEHKKTVPALVKTIEWEMYHPTRKLISPDLKIDKVIDKGIREILKTRLAKFNGDAQKAFSNLDENPIYKDEAKKITLKRVSLEGVSSVIPLHTLKDREGKLVVGKDGKPVLGDYVQTSNNHHIAFYMDENGNLQDNVVSFFEAAERKSQGVPVIDKNYNHDKGWNFLFTMKQNEYFVFPNEVTGFNPSEVDLMDEANYSIISPNLYRVQKMSKASGRDYWFRHHLEAMLNDDPKLRNSMFKRITSLKALEGIVKVRINCIGKIVAVGEYD

SEQ ID NO: 392 - protein, 1380 aa, Prevotella intermedia
MKRILGLDLGTTSIGWALVNEAENNNEASSIVRLGVRVNPLTVDEKSNFEKGKAITTNADRQLRHGARINLQRYKLRRQNLHDCLQKQGWLGTEAMYEEGKASTFETYKLRAKAAEEEISLHEFARVLFMLNKKRGYKSNRKANNKEDGQLFDGMTIAKKLYEEHLTPAEYSLQLLNKGKKFTQGYYRSDLNAELERIWDEQKKYYPEILTDEFKQQLEGKTKTNTSKIFLAKYGIYSADLKGLDRKFQPLKWRVEALQQQVDKEVLAFVISDLKGQIANTSGLLGAISDRSKELYFNKQTVGQYLWASLEENPHISIKNKPFYRQDYLDEFEKIWETQAAFHKQLTPELKQEIRDIIIFYQRPLKSKKSLISVCELEQRKVKATIDGKEKEITIGPKVAPKSSPVFQEFRIWQNLNNVLLIDNDTNEKRPLDEVERNLLYKELSIKAKLSKTEALKILNKKGKQWDLNYRELEGNRTQAILFDCYNRIITLTGHEECDFKKIKASEIRHYVSTIFKNLGFSTEILDFDPSLKKHELEKQPMYQLWHLLYSYESDNSRTGNESLLRKLETTFGFPEEYATVLCDVVFEEDYGNLSVKAMREILPYLQAGNDYSQACAYAGYNHSRHSLTKEELDQKVYKERLELLPKNSLRNPVVEKILNQMINVINAIIDEYGKPDEIRIEMARELKSSAADRKKTTHAISQGNAENQRIREILEKEFSLSYISRNDIIKYKLYEELEPNYYKTLYSDTYITKDKLFSKDFDIEHIIPKARLFDDSFSNKTLEARNINLEKSNKTAFDFIKEKYGEDGAEAYKKKLDMLLENDAISRPKYNNLLRAEADIPSDFINRDLRNTQYIAKKACEILGELVKTVTPTTGKITNRLREDWQLVDVMKELNFEKYEKLGLTEIVEDRDGRKIKRIKDWTKRNDHRHHAMDALAIAFTKPSFIQYLNNLNARSNKGDSIYAIENKELHYEEGKLRFNAPIPVNEFRAEAKRHLSAILVSIKAKNKVMTQNVNKIKTKHGIIKKIQLTPRGPLHNETIYGTKMRPIIKMVKVGAALDEATINKVSSPAIREALLKRLNEYSGNAKKAFTGKNTLEKNPIYLNAGRTKTVPSLVKTVEWESFHPTRKLIDKDLNVDKVVDKGIREILKARLEEFNGDAKKAFSNLEENPIYLDEAKKIALKRVSIEGVLSAIPLHTLKNQAGKPITGKDGKPVLGNYVQTSNNHHIAFYYDEDGNLQDNAVSFFEAAERKSQGIPVIDKDYNRDKGWRFLFTMKQNEYFVFPNEATGFIPSEVDLTDEANYGIISPNLYRVQKVSRIDKGTSASRDYWFRHHLETILNDDAKLKNLAFKRIRGLLELKDIIKVRINSTGKIVAVGEYD

SEQ ID NO: 393 - protein, 1425 aa, Prevotella micans
  Prevotella micans F0438
MIQKIFGLDLGTNSIGSSVRNLELGENLTEQLEFFSSDIFGSSVSKNSNGREYSLAGNRSAHRRSRGLNEARRRKLWATLDLLIEHGLCPMSPDSLMQWRTYDKQKGLYRQYPIEDKDFNAWIMLDFNGDGKPDYSSPYQLRRELVVRQFDFDQPIERYKLGRALYHIAQHRGFKSSKGETIADQEKNEKKPIAEEGADIANEMKASETKLSKGLVAYMQENHLKTVGEAFAKLEDERVRIRNNESYRAIRSQYQDEIKEIFTYQKKLSVESELYERLTSEKKGVGTIFYKRPLRSQRGNVGKCTLERNKPRCPIGRPEFEEFRAWTLINNIKIRETAGEPYKQLPIKLRQELLKDCFLSKVKADFKFEDIRKYIEKRLGLSFSNDDKTINYKDSVSIAACPVTVRMKKLLGENWANCRIDGEKRRQAHGKNNNNEHIVSYTEEDIWHVCYNAEDPEEVSNFARKALHWDENKIKELVRLWTSIPQGYAMLSLKAIRNINRMLLLGLKYSDAVLLAKLPDIVPVSDEDILAITKEFLQLEDKLNQEKQINNIVNSLIANYKSKLEENRFADHNYQYQLGEGDDEDINTQIKSHIGAKLWVQIGADEQTKIFQAVRSKYQDFFKSYKRKFVESPKLGELLVAFLTEKFPNVKSKQWERLYHPSQIAIYRPIPVDNDRSKLRLGNPNIGAIKNPTVMRVLNTLRRRVNQLLDDGVISPDETRVVVETARELNDANTKWALDRYNRIRRDENEKIRKILKELNPTTNSISEQDIDKARYIFEQCETDFYTDGKVPYYNKDIKKYKLWLEQGGQCLYTGQTINLTNLFNPNAFDMEHTIPKSISFDNSDQNLTLCESYYNRFIKKNNIPTDMPNYDKDVTINGKEYTAIKPRLQRWKERVDRLSRNVDFWKGQARRAQDKDRKDECIREKHLWDMELAYWKGKLERFTMTDVTDGFKNSQLVDTRVITRHAVLYLKSIFNHVEVQRGETTAEFRKILGLQSIDEKKDRSLHSHHAIDATMLTVIPSAAKRDRMLELFYKIEETKKALKNYNDNNKTGLNLELKGLEEKLDKEKKDCRVGRRVNDLDRFINENIIVSHHTKDQALTPAHRRLRKRGKIVGGKEHPRWQTGDSLRGEIHKASYYGAITQFAKDANGKVLMKDGQAQIDPTIYYVIRRELKYKRSTQDSGFTNWEDLEKVIVDTDLFGLMKGQFPEGTSFKDACEQGFYMIKKGKNGEGDVKTHRIRHVRCKAVKTALRIKEQTYKSSKDYKQFFYAAVGDLYVMCYYTDGKKRDFKIYSLYDISNHRKSGTEDIPKFITDKKGNHLPLDYKLRTGDMVLLYKDNPEELKDLDQVNLKRRLYKVNRFESEGLIILLTHHLSTTTERGCSIGKIENYQNLPTAIRCGIKTIKFLIMGKHRDFVIRNGNIEFKH

SEQ ID NO: 394 - protein, 1506 aa, Prevotella nigrescens
  Prevotella nigrescens ATCC 33563
MKTILGLDLGPNSIGWAKVEVDDEGNYLRNIKLGSRIIPMTQDMLGDFDKGVKVSQTAIRTDFRGNRRLIERHLLRRERLHRVLHALKFLPKHYEDAIGWDRNEPATYGKFVNNSEPKLAWERQEDGSMRFLFMESFNEMVADFAQNQPSLVSDGKKIPLDWTIYYLRKKALTRPIKKEELAWILLNFNQKRGYYQLRGEEEEDNLTKRKEYYKLKVVGVEADGAPKGGKTWYNIHLENGWTARCQSKIPLDDWVGKVKEYIVTTEYEDDGKTPKCDKEGKVKRSFKSPEKDDWQLIKTRTEKFIDDSNKTVGAFIYDYLLEKPFDKIRGKYIRTIERKYYKNELREILREQTKYHEGLHSLEALKICAEELYKNNQQHQEYLLKKDMTFLLLNDLIFYQRPLKSKKSLIADCPYEVYKYDDKLTGKKGQKKIKCIAKSNPYYQEFRLWQFIANLRLFSVTDGKEVTAEYLKTEEDYVRLFSFLNDRKDIKQETFLRSFLKLKKESIGSEKIYPIRWNYIEDANKSYPCNATRHELLLAFDRADIPRELLDVEEREYRLWHLLYSIEAKEETESALRKLKANKAFGDLNIDDAFVNSFLKIKPFEKEYGAYSEKAIKKLLAVMRRGSLWKEADICEATKQNIAKILQNDIDEKLKKKIEAAVSSFNKLSDFQGLPTWLACYVVYGRHSEAAQIQCWQSPEDLKTYINKFKQHSLRNPIVEQCLLETLRTVYDIWKDAGQIDEIHIELGRNMKSTAEQRARKTKDILRNENTNLRIKNLLVELKNDDKIENVRPYSPSQQEILRIYEEGALQELSKEDEMFEDISKISKMAQPSPTELSRYKLWLEQKYRSPYTGRVIPLSKLFTTAYQIEHIIPQSRYFDDSFNNKVICESEVNSLKDNMLGYEFIKECGGRIVHCTLLGDVKIFTKEEYKDFVTKHYIDNTYKRDKLLLEDIPQEFSARQLNDSRYISKMVQTVLSNIVRAENEQEATSKFVVSCNGAITNRLKKDWGLNDVWSSIVCPRFKRLNEITKTNAFGHWEDKAGKHVFQTTVPLELQRGFSKKRIDHRHHAMDALVIACASRNIVNYLNNESANSPEKREDLRKKLCDEKRKIRKPWKTFTQDAREALSDVVVSFKNYVRVINKATNYYEHYSSSGNKVMISQKGNDMWAIRKPLHKESVFGRVNLCRKVIVSLKKALENIPAICDKTLRDYINALVEKHFNTRQLLAHFKSINYRLNRQCVEKVEVWQFSDEKIEMVARRKSLDTSFDDKQISSITDTGIQKILLNYLQTKDGNAEIAFTPEGIEEMNKNISLYNDGKAHQPILKVRVATPKGMKYPVGQTGNKATKFVVAEKGTNLYFAIYENELGVRSYDTIPLNIVVERLKEGLSPVPQANEADIPLKFYLSPNDLVYVPTKENEDELCRDRIYKFVDSSGTTANFVPHTSANTIYNVDKEYAEKCCNGAVFLNEYGLGSPQSKNQRALTGEMIKEICWKLKVDRLGNIIKVIK

SEQ ID NO: 395 - protein, 1380 aa, Prevotella nigrescens
  Prevotella nigrescens F0103
MKRILGLDLGTTSIGWALVNEAESNNEASSIVRLGVRVNPLTVDEKSNFEKGKAITTNADRQLRHGARINLQRYKLRRQNLHDCLQKQGWLGTEAMYEEGKASTFETYKLRAKAAEEEISLHEFARVLFMLNKKRGYKSNRKANNKEDGQLFDGMTIAKKLYEEHLTPAEYSLQLLNKGKKFTQGYYRSDLNAELERIWDEQKKYYPEILTDEFKQQLEGKTKTNTSKIFLAKYGIYSADLKGLDRKLQPLKWRVEALKQQVDKEVLAFVISDLKGQIANTSGLLGAISDRSKELYFNKQTVGQYLWASLEENPHISIKNKPFYRQDYLDEFEKIWETQATFHKQLTPELKQEIRDIIIFYQRPLKSKKSLISVCELEQRKVKATIDGKEKEITIGPKVAPKSSPVFQEFRIWQNLNNVLLIDNDTNEKRPLDEDERYLLYKELSIKAKLSKTEALKILNKKGKQWDLNYKELEGNRTQAILFDCYNRIITLTGHEECDFKKIKASEIRHYVSTIFKNLGFSTEILDFDPSLEKHELEKQPMYQLWHLLYSYESDNSRTGNESLLRKLETTFGFPEEYATVLCDVVFEEDYGNLSVKAMRKILPYLQAGNDYSQACAYAGYNHSRHSLTKEELDQKVYKERLELLPKNSLRNPVVEKILNQMINVINAIIDEYGKPDEIRIEMARELKSSAADRKKTTHAINQGNDENQCIREILEKEFALSYISRNDIIKYKLYEELKPNGFKTLYSDTYIPKDKLFSKDFDIEHIIPKARLFDDSYSNKTLEARDINLAKSNKTAFDFVKEKYGEQGAEAYKKKLDMLLGNNVISKPKYNKLLMTEADIPSDFINRDLRNTQYIARKACEILGELVRTVTPTTGKITNRLREDWQLVDVMKELNFEKYEKLGLTEIVEDRDGRKIKRIKDWTKRNDHRHHAMDALAIAFTKPSYIQYLNNLNARSNKGDSIYAIENKELHYEEGKLRFNAPIPVNVFRAEAKRHLSAILVSIKAKNKVMTQNVNKIKTKHGIIKKIQLTPRGPLHNETIYGTKMRPIIKKVKVGAALDEATINKVSSPAIREVLLKRLNEYSGNAKKAFTGKNTLDKNPIYLNAERTKTVPASVKTVEWENYHPIRKPITPDLKVDKVIDKGIGEILKARLEEFNGDAKKAFSNLEENPIYLDQTKKIALKRVSIEGVLSTIPLHTLKNQAGKPIMGKDGKPVLGNYVQTSNNHHIAFYYDEDGNLQDNAVSFFEAAERKSQGISVIDKDYNRDKGWRFLFTMKQNEYFVFPNEATGFIPSEVDLTDEANYGIISPNLYRVQKMSRIEKGTSVSRDYWFRHHLETILNDDSRLKNSAFKRINSLKPLEGIIKVRINSIGKIVAVGEYD

SEQ ID NO: 396 - protein, 1391 aa, Prevotella oralis
  Prevotella oralis ATCC 33269
MKKILGLDLGTTSIGWALVNEKENNEELSSIIRLGVRVNPLTVDEKSNFEKGKDITTNADRTKCRSARRNLQRFKLRREALADCLKRHGLMTDETPLCETNNSIIFKTYSNRAKAVCEKIALDDFVRVLFMINKKRGYKSSRKLNTDDEGTLVDGMDVAKLLYNEQITPGEYLLRLFKKGKKTRPDFYLSDLKAELERIWDFQRTFYPEILCNALKEDLKGKSRTQSSAIFYAKYKVSTAKIAGKDKRLQELTWRTDALRKQLTIDEVAYVICSINGEVNGSSQRLSMISDRSKLLYFNHQTIGQYLMQRLEENPNAGLKNIIFYRQDYEDEFNDIWNSQATYHKELTPELKKEVKDIIFYQRGLKSCKWLINYCELEHEEIEVKTPEGKLRKITIGSKTCPKSSPLFQEFKIWQVLNNLQVSPLNSRRKAKRKKDEEPSLFSDEDMNTACRYLNEEEKLTLFKELSIKKELKKKDALKLLFENYKELDLNYKVISGNVTMANLYRAFQDIISLTGNGEFDFQAMPAEEAEKTVEEIFGGLGYKTAFLHFDASLHDKEFERQPAYRLWHLLYSYAGDQSKTGIEALVKRIQELCGFEPEYARILANISFIPDYGNLSSKAMRKILPYMQDGYEYSEACSKAGYRHSASSLTKEEINKKNYKTHLDEIKRNSLRNPIVEKILNQMVNVVNSVIDTYSNIDEIRIEMARELKKSKPEREDMSFAISKATKETERIKGILEQEFKIQHVTRNDIIRYRLYEELKPNGYKTLYSNTYIPREDLFSKKFDIEHIIPKARLFDDSYSNKTLELRDINIEKGNQTAYDFVLSKYGEEGLYKYEQRVEEFKKNNEQAGTKCRKLLMREADIPSDFLNRDLNDSQYIAKKAHELLREIVPTVTATTGSITNRLREDWKLVNVMKELNWEKYDKLGLTEEYKDKDGNTVRHIKDWTKRNDHRHHAMDALTIAFTKPSFIQYLNNLNARSNRGGSIYGIEQKELERENNKLVFIPPIDPKIFRKQAKEHLSNILISIKAKNKVVTKNVNKTKSKSGTNRKVQLTPRGQLHLETVYGKIRTYKTEEIKVGTKLTEELIAKVADKKIREALMQRLSEYGGNIKKAFQNISKHPIWLNGSHTKHVPEKVKIVFFEDVFTIRKAITPDIKIDKVIDSKIRRILQERLNEFGGEASKAFSNLDENPIWFNRDKGIAIKSVKIRGIAKGTAIRVKKDIHGKTIIGNNGYPVANDYVNTGNNHHVAIFRDKDGNLQEHIVSFYEATARAIQNLPIVDRNYNSEKDWKFLFSMKQNEYFVFPNPNTGFNPSEISLKDEKNYALISPNLFRVQKLSHYYYVFRHHLETNVDTNLQLKDITWKRITAVNNLTGAVKVRIDHLGRIVDVGEYK

SEQ ID NO: 397 - protein, 1204 aa, Prevotella ruminicola
MERILGIDTGTNSLGWAIVDKDENQYHLVAKGTNIFSEGVKIEKGIESSKAAERTEHRSVRKHYWRRKIRKIRLLTILSDNDLCPRLKHEQLRQWRLKKVYPTDDTFMEWQRTEDKAQVNPYKFRYICLTQKLDLSDITQRFILGRALYHLNQRRGFLSNRKEATKESEGTVKEGISSLSKDMKDSGCEYLGEYFYQLYQQGKKIRNHYTARKEHYLKEFKAICSKQELDDALIEKLEKAIFDQRPLKSQKGQVGTCTFEKGKSRCPSSHPLYEDFRMYSFINNIKVQVDTLYDKGERSLTDEEKQLIIPLFKRKSKRTFPFEDIAKKIAGKNNYCYIKSNEEKAYKFNYQMDTQVSGSPVNAQLEEIFGEDWLSSVCEVYTLANNKSRFQIMNDVWHVLFFYDDEDKLKEFAKDRLQLDDELAEKFSKISIPNDYAALSLKAIRKIMPYLRDYGLIYSEAVFLANLVDVLPQHVWGIKEMREAAIENVIDVMHSYDKNNIDGITLEGCVKTFLKERYQVSDDNLKKLYHPSMLDPYPRQRPNDEGVFQLGSPRISSVKNPMAMHSLFRLRKVVNLMLKKGYITPDTKVHIEFSRDLNDANKRWAIQTWQRENEKERERCRKEIEKYIASPSDTDILKYQLWEEQNHKCLYTGDEIRITDFLGDNPKYDIEHTIPRSAGGDSTKMNLTLCSSRFNRDEKKTKLPAELVNHDEILERISNWKEKYEDIDKQIRKISTKGATSKEDKDSKIRRRHYLILQRDYWRGKYQRFTMTEVPEGFSRRQGTDISVISRYARMYLKSVFKQVYIVKGIATSDFRKMWGIQDEYAKKERVNHVHHCIDAITIACIGKAEYDKLADYRHQYDDYLFQGKTKPTFDKPWPSFVIDIKHIQDELLIAHYAKDNLEKFTKKNLRGKDGRIIRDKFGNKLQMKGDTSRNSLHNDKFYGAINHEGEIKYVYRTNIEALDAKSIGNIVDPTVRSIIESAIAIHGSLKAAINKGIWMNEEKHIPIKKVRVFRNDVKKPIELKDQRDLSDKDYKQHYYVTNDGNYMMLIFSKLNNKGREIRQHVVINSLEATEVIKSHKRSQVGKVVWESYYSKEGFDLIYKLKSGTMILLYENNRDEVWDLDIRNLQKRLYIITKMKYDGRIYMMHHQEAREKKDLEEKSGSFKINEDYRPLIVNSYNQFNALVQDLDFEINDLGEIRRLI

SEQ ID NO: 398 - protein, 1424 aa, Prevotella sp.
  Prevotella sp. C561
MTQKVLGLDLGTNSIGSAVRNLDLSDDLQWQLEFFSSDIFRSSVNKESNGREYSLAAQRSAHRRSRGLNEVRRRRLWATLNLLIKHGFCPMSSESLMRWCTYDKRKGLFREYPIDDKDFNAWILLDFNGDGRPDYSSPYQLRRELVTRQFDFEQPIERYKLGRALYHIAQHRGFKSSKGETLSQQETNSKPSSTDEIPDVAGAMKASEEKLSKGLSTYMKEHNLLTVGAAFAQLEDEGVRVRNNNDYRAIRSQFQHEIETIFKFQQGLSVESELYERLISEKKNVGTIFYKRPLRSQRGNVGKCTLERSKPRCAIGHPLFEKFRAWTLINNIKVRMSVDTLDEQLPMKLRLDLYNECFLAFVRTEFKFEDIRKYLEKRLGIHFSYNDKTINYKDSTSVAGCPITARFRKMLGEEWESFRVEGQKERQAHSKNNISFHRVSYSIEDIWHFCYDAEEPEAVLAFAQETLRLERKKAEELVRIWSAMPQGYAMLSQKAIRNINKILMLGLKYSDAVILAKVPELVDVSDEELLSIAKDYYLVEAQVNYDKRINSIVNGLIAKYKSVSEEYRFADHNYEYLLDESDEKDIIRQIENSLGARRWSLMDANEQTDILQKVRDRYQDFFRSHERKFVESPKLGESFENYLTKKFPMVEREQWKKLYHPSQITIYRPVSVGKDRSVLRLGNPDIGAIKNPTVLRVLNTLRRRVNQLLDDGVISPDETRVVVETARELNDANRKWALDTYNRIRHDENEKIKKILEEFYPKRDGISTDDIDKARYVIDQREVDYFTGSKTYNKDIKKYKFWLEQGGQCMYTGRTINLSNLFDPNAFDIEHTIPESLSFDSSDMNLTLCDAHYNRFIKKNHIPTDMPNYDKAITIDGKEYPAITSQLQRWVERVERLNRNVEYWKGQARRAQNKDRKDQCMREMHLWKMELEYWKKKLERFTVTEVTDGFKNSQLVDTRVITRHAVLYLKSIFPHVDVQRGDVTAKFRKILGIQSVDEKKDRSLHSHHAIDATTLTIIPVSAKRDRMLELFAKIEEINKMLSFSGSEDRTGLIQELEGLKNKLQMEVKVCRIGHNVSEIGTFINDNIIVNHHIKNQALTPVRRRLRKKGYIVGGVDNPRWQTGDALRGEIHKASYYGAITQFAKDDEGKVLMKEGRPQVNPTIKFVIRRELKYKKSAADSGFASWDDLGKAIVDKELFALMKGQFPAETSFKDACEQGIYMIKKGKNGMPDIKLHHIRHVRCEAPQSGLKIKEQTYKSEKEYKRYFYAAVGDLYAMCCYTNGKIREFRIYSLYDVSCHRKSDIEDIPEFITDKKGNRLMLDYKLRTGDMILLYKDNPAELYDLDNVNLSRRLYKINRFESQSNLVLMTHHLSTSKERGRSLGKTVDYQNLPESIRSSVKSLNFLIMGENRDFVIKNGKIIFNHR

SEQ ID NO: 399 - protein, 1483 aa, Prevotella sp.
  Prevotella sp. MSX73
MKTILGLDLGTNSIGWAKVSVDDYGNYLHDIKLGSRIIPMSQDVLGNFDSGVTVSQTAQRTEFRSKRRLVQRNLQRRERLHRVLHVLDFLPAHYDAAIGWDRTEAVTYGKFLNHAEPKLAWEELGNGKRRFLFMDSFHEMVADFARCQPALVADGKKIPLDWTIYYLRKKALTQAITKEELAWILLNFNQKRGYYQLRGEEEEENPTKQEEYYELKVVSVEATDSRKGNDTWYNVHLENGWIYRRSSKISLDDWVGKVKQFIVTTEYEKDGTTLKTDKEGNVKRSFRAPNENDWGLRKKRTETLLEMSGKTVGAFIYDHLLQEPADKIRGNFIRTIERHYYKAELEAILAEQCKYHIELRDKEMLEACARELYLNNLPHQRSLMKKDMTYLLLYDLIFYQRPLKSKKALIANCPYEYYEYVDKETGEIKRQNIKCIAKSNPYFQEFRLWQFVLNLRLFDRVEDKEVTANYLPTADDHARLFTYLNDRKEINQETLLKDYFKLKKVKIGNEKEYPIRWNYIEDKEKKYPCNETRYELLMALDRAGIEHKWLDDNNLEYRLWHLLYSVEVKSESETALRKLKNDDAFVNSFLKVKPFKKEYGAYSEKAIKRLLAVMRKGFLWNEQDICDETRKRIEIIIKGDVDEKVKERMGHAAYSFDRVSDFQGLPEWLACYVVYGRHSEAMDIQRWDSPERLMAYINNFKQYSLRNPIVEQCILETLRTVHDIWKETGQIDEIHVELGREMKSTSEERARRTQNVLRNENTNLRIKSLLIELKNDTDICNVHPYSPMQQEILRIYEEGALQELNREDEDFEEISKISQMSQPSGKELNRYKLWLEQKYRSPYTGKAISLAKLFTPAYQIEHVIPQSRYFDDSFTNKVICEAEVNTLKSNLLGYEFIKKHGGEIIHCTTLGDVRIFSESEYKAFVMDHYANNKSKKDKLLMEDIPQEFLSRQMNDSRYISKVVKTLLSNIVRMADESEATSKSVIVCTGGVTDRLKKDWGLNDVWNSIVYSRFERLNRLTGTEAFGHWENKDGKRVFQTSMPLELQRGFRKKRIDHRHHAMDALVIACASRNIVNYLNNESANNPKKREDLRRQLCDKNRVIRKPWETFTQDAYNALENVVVSFKNYVRVINKATNRYEHYDENGKKRFVQQKGSELWAIRKPMHKETYYGHVNLRRKELVTLQKALDDIPSICDKKLRDYISALVEKHFNKRQLLAHFKSTDYYWQKQYVNKVYVWTFSDDIKPLVATRKLLDTSFDAKRIGTITDTGIQKILRNYLEAKGGNATLAFTPEGIVEMNQNISKYNDGKPHQPILKVRITEPMGAKYRVGQTENKMAKYVEAQSGTNLYFAIYEDSEGKRSYTTVPLDEVAERLKQRLSPVPEKDENDVPLKFYLSPNDLVYVPTEEELQLRECKLNKDRIYKMVSSTGSECHFIPYYVANVIYNKVEFEAKNKIGRALTGEMIKAVCWKLEIDRLGNILKVIK

SEQ ID NO: 400 - protein, 1375 aa, Prevotella sp.
  Prevotella sp. oral taxon 306 str. F0472
MKKILGLDLGTTSIGWALVNESENKDEQSSIVRLGVRVIPLTVDEKGNFEKGKAITTNADRQQVHAARINLQRYKLRRENLRDCLQKQGWIGSEPMCEDGKSSTFETYKLRAKAAVEEVSLHEFARVLFMLNKKRGYKSNRKANDKEEGKLFDGMTIAKKLYEEHLTPAEYSLQLLNTGRKFTPEYYRSDLIEEFEKIWNEQQKYYPEILTDEFKQQLEGKAKSNTSKLFLGKYGIYSADTKGLDRRLQPLKWRVEAMKQQVDKDVLAFVISDLKGQIANTSGLLGAISDRSKELYFSKQTIGQYLWASLQENPHISIKNQPFYRQDYLDEFEKIWETQATYHKELTSELKQEIRDIIIFYQRPLKSKKNLIAVCELEQRKVKVTVDGKEKEITIGPKIAPKSSPMFQEFRIWQNLNNILLLDHETNSKRPLYEEERNLLYEELSVKEKLSKTEALKVLGKKSKQWDLNYKELEGNRTQAVLYDCYNRIIVMSGHEECNFKKLKASDIRHYVKMIFKNLAFNTDILCFDSSLKGHELERQPMCQLWHLLYSYEGDNSRTGNDALLRKLETSFGFPKEYAAVLADVIFEDSYGNLSVKAMRNILPHLQAGKDYSQACEEAGYKHSRRSLTKEELNQKVYKEKLELLPKNSLHNPVVEKILNQMVNVINAVIEEYGKPDEIRIELARDLKIGAAERENMTRSINQGNAENKRIREILEKEFALSYLSRNDIIKYKLYEELKSNGFKTLYSDTYISKDKLFSKDFDIEHIIPKARLFDDSLSNKTIEARDVNIAKSNKTAFDFILERYGEQGVKTYKTKLLRLLEDGAISNKKYNNLLKTEADIPSGFIDRDLRNTQYIAKKAYEILSELVKIVTPTTGSVTNRLREDWQLVDVMKELNFEKYQKLGLADVIEDRDGRKVKRIKDWTKRNDHRHHAMDALTIAFTKPSYIQYLNNLNARSDKSSSIYGIEVKELHREEGKFRFNAPLPINEFRAEAKRHLKSVLVSIKAKKKVMTQNVNKIKTKHGIIKKVQLTPRGELHNATYYGTKKRPLVRMVKVGAALDEATIKRVCSPAIRAALLKRLNAYNGDAKEAFTGRNSIDKNPIYLDIEQTKLVPVLVKTIEWGMYHPIRKRITPDLKIDKVIDKGIREKLKARLAEFNGDAQKAFSNLDENPIYMDEAKRITLKRVSIEGVLSAIPLHTLKDKAGKPVIGSDGKPVFGDYVQTSNNHHIAFYIDDKGNLQDNPVSFFEAAERKSQGVPVIDRRYNCDKGWHFVFTMKQNEYFVFPNEATGFIPSEVDLLDEANYCIISPNLYRVQKLSKASGRDYWFRHHLETMLNDDLRLKNSTFKRIQSLKGLEDIVKVRINSIGKIVAVGKYD

SEQ ID NO: 401 - protein, 1216 aa, Prevotella stercorea
  Prevotella stercorea DSM 18206
MTKILGIDTGTNSLGWAIVDKTADNYNLLDKGVNIFQEGVKIEKGIESSKAAERTEHRATRVRYYRIKLRKIRLLRILSDNHLCPPLSQEELSTWRLKKVYPKNELFMQWQRTDDDTEKTPYAYRHKCIHEKLDLSDVTDRYILGRAFYHIIQRRGFLSNRKEQGGEDSGKVKEGISTLTHEMNEAGYEYLGDYFYALYNKGEKIRKHYTARNEHFLSEFKAICEKQDLEKELGSEVVRNIEKAIFDQRPLKSQKGQVGKCVFEKNKTKCPSSHPMYEEFRMLTFINNIKIKTPNDDVLRPLNTGEREKIMPLFFRKSKKQFDFEDITKKLAPKKMYGFYKKEEDAEMPFLFNYPMDTSVSGCPVTAALKDVFGDDWITAICETYTLGEGKSRFDIVNDIWHALYFYSDKDKLAEFAINRLQLSEDEAKIFSEISLPADYASLSLKAICKILPYLRRGLIYSHAVFLGNLCEVMPKYEWSIKEMRETIIDNIIMEMDKCDTKDKRTFEVCIKDYLKGQYNVSDNSLKKLYHPSMIETYPRVQYTNEHGVYQLGSPRIDSVRNPMAMRSMFRLRKLVNRLLVEGKIDQNTEVHIEFARELNDANKRNAIALFVKENQSANDEARKQIITLFKKETGTDIEPTDKDILKYVLWEEQNHICLYTGKQIRISDFIGANPKFDIEHTIPRSVGGDSTKMNLTLCDSRFNREVKKTKLPVELPNHDEIMERIKEWKKNYELLDIQIRKNKKLSKGATTKEQKDTIIRKRHLLELRRDYWRGKYERFTMESVPEGFSRRQGTDISVISKYARLYLKSLFNRVYTVKGIATSDFRKIWGIQDIYSKKERINHVHHCIDAIVIACIGLDEYNKLGAYYHDEENNKWYGMSKASFKKPWATFVEDIKKIQDEILVYHYTPDNMPKQGRRRIKIDGKKILCKGDAARGSLHNDTYYGAIENDGAVKYVKRIDLASLEEKDVKNIVDDTVRSIIEAAIKEKGFKDAMASTIWMNEEKRVPIKKVRCFTPSITKPLNIRKQRDVSIKEYKQQYHVANDSNYLLALYIGTDNKGKEKREFEIVNILQAAQYYRTSNDKEVVDRHIVPIKSEHDYPFAYTLKIGTMVLLYEKSPNEVWDATIKERNRRLYKVTGLSTMRMKGRNGEYAYATVKLIHNEEARPSKDIKAKNGEYEQGEEFRPAIIMLHTQLNALVQGYDFEINELGEIRRLR

SEQ ID NO: 402 - protein, 1234 aa, Prevotella tannerae
  Prevotella tannerae ATCC 51259
MPNFWSIFTENLQTYLMKTRILGLDTGTNSLGWAVVDRDENNQYTPICRGDLIFTEGVKQEKGIEFSLAAERTSYRASRRHYFRRRLRKVEVLKVLVKHKLCPPLSDEALNRWHTKKEYPLDEDFILWQRTNEADNKNPYHDRHICLHRKLNLKDSQTDRYTLGRALYHLTQRRGFLSNRLDQNEEAEETGKVKSAISELSKEMKEAGCEFLGDYFYLLYRTEGNRVRIRSRYTDREKHYLQEFKEICRVQELDEDLAKALEKTIFFQRPLKSQRQGVGKCTMEKGHSRCAVSHPLYEEYRLLCYLNNIRIKTPSDDRLRPLNAEEREKITPLFYKEKNFDFEKIAKKLAGKTPFGWIRDAEDWPYQFNYRMTQEAPACPTTAQLIKVFGEDWKAALAETYTMSAKQDGTLKTEDEICTDIWNVLYSFSSKEKLKEFGLKKLQLDEVQAKAFSEIRLTRDFASLSLKAIRKILFFLRTGEDYSKAIFLANIPTIVGEEIWNDIERRSRLLYKVDLALRPQEERDAEEHRTIAERIKAAVAAEVPDAPIDLLYHPSMIEAYPDAKRNERFDCYQLGSPKTNAVRNPMAMRSLHMVRKVINHLLRKHIIDEKTEIHIEYARELNDANKRQAIADWQRELSKRHTAYAQNIRQLYKAETGLVIEPTKADILKYQLWEEQQHVCLYTGKKIGIADFLGANPKFDIEHTIPRSRGGDSTQENLTLCESKFNRDIKRDKLPTELANYEEILARIEHWKKQCYALKLKRDGIRTHSGLEKSIKDSRIRRRHLVGLEYGYLKGKYDRFTMKEVPEGFSRRQGAGIGLISKYAGLFLKSLFKDPKNPNRSNVYVVKGAITAEFRKLWGLQQADEAKSRENHTHHCIDAYTIACIGPCEYAALAAYYRSDEEFKYGRRREKPQFEKPWPTFTEDLLKLQEELLIVHQTTDKLGKRDRRKVKTPRGKFLTGGDSARGRLHQETYYGAINYDGNIKYVVRKPLDSLTEKDLDKIVDETVMGIVKGAVEAKGSLKEALADGIYMNKEKGILIKRVRIFSDVSEPINLKQLRDVSTKEYKRHIHLRKDENYLFAIYEGIDKKKNKKQTETATVDYLDAAKFYKDSKRRDKANSLVGDYSKKNKLPLKCILKKRQMVLFYEHSPEEIRFKDKKDLSRRLYIVTSIAKDGRVKFLHHQAATATGIQSSPSPFTNDGEHQPYYRLSASNIKVLVAGIDFDINILGEITPKL

SEQ ID NO: 403 - protein, 1487 aa, Prevotella timonensis
  Prevotella timonensis CRIS 5C-B1
MKNILGLDLGSNSVGWALVKVEENGNPIGSIKMGSRIIPMSQDILGSFEKGDTVSQTAQRTLYRGKRRLIERHVLRRERLCRVLHIMNFLPAHFDRLLGWDKTDNKTYGKFIDDSEPKLAWRQNKNEMGKMEFVFMDSFHEMLSDFAKHQPQLIANGKKVPLDWTIYYLRKKALTQLISKEELAWILLNFNKKRGYYQLRGEEEEEQPTKKEEYKVLKVISVDADEGQKGNGIWYNIHLEDGGIYKKKSDIPLYDWVGKTLQLIVVTTYEKDGKTPKIFDSGKQNPSYRLPKEDDWGLVKKRTESQLQSSGKTVGAFIYDNILSKPDDKIRGNLVRTIERKYYKKELIEILQQQAKYHDELHNQNLLESCAKELYAHNDVHYNEVIKSNMINLLVNDIIFYQRPLKSKKSLIANCKYESYEYVDKETGEIKEMPIKCIAKSNPYYQEFRLWQFIHNLRLSDVVTREDVTAQYLSTPQDYCNLFTYLNDRKEIKQDILLKDFFKIKKVQIDKEKVFPIEWNYIKDATKSYPCNETRYELLSALKRAGMDKQWLDDTPNMQYRLWHLLYSVEEKEESAKALRKLYDDDKFVTSFLKIKPFNKCYGAYSEKAIKRLLTLMRMGKAWNEQAIDAKTLKCIQQIITDNVDSKLKEKIDDSRYVLHHVSDFQGLPTYLASYVIYGRHSEVTDIQCWDSPEDLLKFIRDFKQHSLRNPIVEQVILETLRVVYDIWKAEKHIDEIHVEVAREMKLTAQQRNEANLRNLNNEATNLRIKYLLEELKNDTFIKDVRPLSPIHQEKMRIYEQAVLGNLNKQDKDYDDIIKISKKEHPTNAELIRYKLWLEQRYCSPYTGKAISLSKLFTTAYEIEHIIPQSRYFDNSFNNKVICEAEVNKAKGNMLGYEFIKKQGGQKIYCTQLGKAVTILKEEAYKQFVNEHYAHNKRKRDNLLAENIPESFSSRQLNDTRYITKTIMSLLSNVVRQQSEEEATAKNLLPSSGSVTDRLKNDWGLKDVWNTIVTPRFERLNKLSGTNDFGEMKEENGNRYFQTNVPLEYEKGFKKKRIDHRHHAMDALVIACTTRNMVNYISNANANSPKQREDLRQLLCDKNRIINKPWDTFTQDALKALNDIVVSFKNNVRIINRATNRYQRYDKNGKKIIFSQKGDDMWAIRKSMHKETVFGRVNLIRKEVLPIAKALDNISAICNAQLRAYVNDLVDKHFNKKQLVAHFKSLNYKWNRQDVSKVEVWISSDNKTPMVAVRKPLDTSFDKKKIASITDTGIQTILLNYLESKGGDASVAFAPEGIQEMNSNIELYNNGKAHKPIKNVRLSEPLGAKYQVGERGAKTKKYVEADKGTNLFFAIYEDEEGKRYYYSVPLREAIERQKQKLSPVPEYNEKGVALKFYLSPNDLVYVPTEEERTMGTCHIDKARIYKMVSSTGCSCYFVPSTFAKVIVDKVELQSLNKMEKAITDECIKEVCWKLKVDRLGNIINVIK

SEQ ID NO: 404 - protein, 1218 aa, Prevotella timonensis
  Prevotella timonensis CRIS 5C-B1
MNKRILGLDTGTNSLGWAVVDWDEHAQSYELIKYGDVIFQEGVKIEKGIESSKAAERSGYKAIRKQYFRRRLRKIQVLKVLVKYHLCPYLSDDDLRQWHLQKQYPKSDELMLWQRTSDEEGKNPYYDRHRCLHEKLDLTVEADRYTLGRALYHLTQRRGFLSNRLDTSADNKEDGVVKSGISQLSTEMEEAGCEYLGDYFYKLYDAQGNKVRIRQRYTDRNKHYQHEFDAICEKQELSSELIEDLQRAIFFQLPLKSQRHGVGRCTFERGKPRCADSHPDYEEFRMLCFVNNIQVKGPHDLELRPLTYEEREKIEPLFFRKSKPNFDFEDIAKALAGKKNYAWIHDKEERAYKFNYRMTQGVPGCPTIAQLKSIFGDDWKTGIAETYTLIQKKNGSKSLQEMVDDVWNVLYSFSSVEKLKEFAHHKLQLDEESAEKFAKIKLSHSFAALSLKAIRKFLPFLRKGMYYTHASFFANIPTIVGKEIWNKEQNRKYIMENVGELVFNYQPKHREVQGTIEMLIKDFLANNFELPAGATDKLYHPSMIETYPNAQRNEFGILQLGSPRTNAIRNPMAMRSLHILRRVVNQLLKESIIDENTEVHVEYARELNDANKRRAIADRQKEQDKQHKKYGDEIRKLYKEETGKDIEPTQTDVLKFQLWEEQNHHCLYTGEQIGITDFIGSNPKFDIEHTIPQSVGGDSTQMNLTLCDNRFNREVKKAKLPTELANHEEILTRIEPWKNKYEQLVKERDKQRTFAGMDKAVKDIRIQKRHKLQMEIDYWRGKYERFTMTEVPEGFSRRQGTGIGLISRYAGLYLKSLFHQADSRNKSNVYVVKGVATAEFRKMWGLQSEYEKKCRDNHSHHCMDAITIACIGKREYDLMAEYYRMEETFKQGRGSKPKFSKPWATFTEDVLNIYKNLLVVHDTPNNMPKHTKKYVQTSIGKVLAQGDTARGSLHLDTYYGAIERDGEIRYVVRRPLSSFTKPEELENIVDETVKRTIKEAIADKNFKQAIAEPIYMNEEKGILIKKVRCFAKSVKQPINIRQHRDLSKKEYKQQYHVMNENNYLLAIYEGLVKNKVVREFEIVSYIEAAKYYKRSQDRNIFSSIVPTHSTKYGLPLKTKLLMGQLVLMFEENPDEIQVDNTKDLVKRLYKVVGIEKDGRIKFKYHQEARKEGLPIFSTPYKNNDDYAPIFRQSINNINILVDGIDFTIDILGKVTLKE

SEQ ID NO: 405 - protein, 1496 aa, Prevotella veroralis
  Prevotella veroralis F0319
MKTILGLDLGTNSIGWAKVCVDDNGNYLRDIKLGSRIIPMSQDVLGNFDKGVTESQTSVRTGFRGVRRIRERSLLRRERLHRVLHVLGYLPPHYDSAIGWNKNEPSTYGKFLNHGEPKLAWEHKEDGSMRFLFMESFHEMMADFAKSQPSLVSDGKKIPLDWTIYYLRKKALSQPIRKEELAWLLLNFNQKRGYYQLRGEEDDDNPTKCEEYYELKVVGIEADEEGKNGNTWYNVKLENGWIYRRQSKIPLDDWIGKVREFIVTTEYEKDGITLKKDKNGDVKRSFRSPSEDDWGLRKKRTEKLLDSSKMTVGAFVYDHLLAEPSDKIRGKFIRTIERKYYKKELYAILCEQSKYHEELRSGDYLNKCAEELYKNNQPHRNSLLTKDLAYLLLEDLIFYQRPLKTKKSLIAECPYEAYKYVDKETGEIKRQGIKCIAKSNPYYQEFRLWQFISNLRLFNKADDKEVTADYLPTQDDYVRLFAYLNDRKEINQETLLKEFFKLKKITVNSEKVFPIRWNYIEDKEKKYPCNETRHELLLALDRARIDHSWLEKPGQEYRLWHLLYSVESKEETKEALRKLKDDDAFVESFLKVKPFKREYGAYSEKAIKKLLAVMRMGSLWRETDICDTTKGNITKILQGEIDEKLKEKISASVSSYNQLSDFQGLPVWLACYVVYGRHSEAAEIQHWKTPESLLAYINGFKQHSLRNPIVEQCILETLRTVHDIWKEVGHIDEIHVELGRNMKSTADQRARISENVLRNENTNLRIKSLLLELKNDPNIKDVRPYSPMQQEKLRIYEEGVLQELTKDDKDFTEITKISTMAQPSAKELQRYKLWLEQKYRSPYTGKSISLTKLFTSAYQIEHVIPQSRYFDDSFSNKVICESEVNSLKDNMLGYEFIKNHGGEIIHCTMLGDVKVLSESEYKAFVNDHYAHNKRKRENLLLEDIPQEFLNRQMNDSRYISKVVKALLSNIVRAEGEEEATSKFVVSCSGGITDRLKKDWGLNDVWNKIVYPRFERLNRLTGTEAFGQWENKDGKRVFQTAVPLELQRGFNKKRIDHRHHAMDALVIACTSRNIINYLNNESANNPKKREDLRQKLCDKNRTIRKPWETFTQDATAALEDVIVSFKNYVRIINKATNYYERYDVEGKKVIAEQRGDDMWAIRKPMHEATYYGRVNLRRKKKVNLRVALENISSICDNKLRIYINGLVEKGFNTKQILDKFKNTNDHFSMQKIDKVEIWQFTNEEEKLVATRKPLDTSFDTKKIASITDTGIQTILLNYLETKGGDSTIAFTPEGIVEMNQNISKYNNGKEHMPILKVRLYTKLGKKIPVGQTGCKAKQFVIAEAGTNLYFAIYEDEEGKRSYRTIPLNEVVERLKQGLSPVPEKNDKDVHLKFYLSPNDLVYVPIEDEHESLAKDHIYKFVDSSGTTANFIPHRSANVIFELNKKDAEKFCSGSIIQNEYGVGSSQSKNQKAITGEMIKAVCRKLEVDRLGNVIKVI

SEQ ID NO: 406 - protein, 1062 aa, Ralstonia syzygii
  Ralstonia syzygii R24
MAEKQHRWGLDIGTNSIGWAVIALIEGRPAGLVATGSRIFSDGRNPKDGSSLAVERRGPRQMRRRRDRYLRRRDRFMQALINVGLMPGDAAARKALVTENPYVLRQRGLDQALTLPEFGRALFHLNQRRGFQSNRKTDRATAKESGKVKNAIAAFRAGMGNARTVGEALARRLEDGRPVRARMVGQGKDEHYELYIAREWIAQEFDALWASQQRFHAEVLADAARDRLRAILLFQRKLLPVPVGKCFLEPNQPRVAAALPSAQRFRLMQELNHLRVMTLADKRERPLSFQERNDLLAQLVARPKCGFDMLRKIVFGANKEAYRFTIESERRKELKGCDTAAKLAKVNALGTRWQALSLDEQDRLVCLLLDGENDAVLADALREHYGLTDAQIDTLLGLSFEDGHMRLGRSALLRVLDALESGRDEQGLPLSYDKAVVAAGYPAHTADLENGERDALPYYGELLWRYTQDAPTAKNDAERKFGKIANPTVHIGLNQLRKLVNALIQRYGKPAQIVVELARNLKAGLEEKERIKKQQTANLERNERIRQKLQDAGVPDNRENRLRMRLFEELGQGNGLGTPCIYSGRQISLQRLFSNDVQVDHILPFSKTLDDSFANKVLAQHDANRYKGNRGPFEAFGANRDGYAWDDIRARAAVLPRNKRNRFAETAMQDWLHNETDFLARQLTDTAYLSRVARQYLTAICSKDDVYVSPGRLTAMLRAKWGLNRVLDGVMEEQGRPAVKNRDDHRHHAIDAVVIGATDRAMLQQVATLAARAREQDAERLIGDMPTPWPNFLEDVRAAVARCVVSHKPDHGPEGGLHNDTAYGIVAGPFEDGRYRVRHRVSLFDLKPGDLSNVRCDAPLQAELEPIFEQDDARAREVALTALAERYRQRKVWLEELMSVLPIRPRGEDGKTLPDSAPYKAYKGDSNYCYELFINERGRWDGELISTFRANQAAYRRFRNDPARFRRYTAGGRPLLMRLCINDYIAVGTAAERTIFRVVKMSENKITLAEHFEGGTLKQRDADKDDPFKYLTKSPGALRDLGARRIFVDLIGRVLDPGIKGD

SEQ ID NO: 407 - protein, 1066 aa, Rhodopseudomonas palustris
MSERVVRRILGIDLGIASCGWGVVDISGAGGGIIATGVRCFDAPLIDKTGEPKSATRRTARGQRRIVRRRRQRMNGVRRLLCEFGLLPDPRPDALNQAMRRISTASAAAQVTPWTLRAAAHQRLLSNEELAVVLGHIARHRGFRSNAKNEAGANAADETSKMKKAMEATREGLAKYHAFGDMIANDPKFANRKRNRDKDYSHTAKRSDLEDEVRAILRAQLRFGSAAATETLAQTFADVAFFQRPLQDSEDRVGDCPFEPGQKRAARRAPSFELFRFLSRLANLKLAVGRSPERRLTAEEIALAAKGFGETKKTITFKSLREALDLDPNARFSGIGKDKEASLDVVARTGGAAYGTKTLKDALGDAPWRSLSRTPETLDRIAEILSFREDITSIRNGLEDLGLDSLVVEALMQAAANGDFKEFTRAGHISARAARNIIPGLREGLVYSEACARVGYDHAARLSVPLDQVGSPVTRKALSEALKQVRAVAREYGPIDYFHIELARSVGKSAEERKQLTDGIEARNVEKAKRRKQAEEHLGRAPSDDELLRYELAKEQNFKCIYSGDAIDPAGVAANDTRYQVDHILPWSRFGDDSYLNKTLCTARSNQNKRGRTPFEWFEADKTDVEWMEYVARVENLQEVKGRKKRNYSIKDAAAIEDKFKARNLTDTQWATRLLADELSRMFPPRECERAICGRADGGNDGLTIVEERRVFTRPGAITSKLRRAWGLEGLKKQDGKRVEDDRHHAVDALVLAATTESLLQRLTVEVQRREREGRPDDIFHCAEPWRGFRADVRRTVYGSETMPGIFVSRAERRRARGKAHDATIKQIREIEGERLVFERKPVEKLTDKDLEKIPIPKPYGQVSDPKRLRDELVESLRAWIAAGKPKDRPPLSPKGDVIRKVRIQTNDKVSVEINGGTVDRGDMARVDVFRKKNKKAVWEYYVVPIYPHQIVALNDPPDRAVIAYAEDKDWKEIDSSYEFLWSLFGLSYVEISKANGECIDGYFRGLHRGTGAASVCKHISLGKDATVSGIGLKTLASFKKFTIDRLGRKFEIPREVRTWRGEACT

SEQ ID NO: 408 - protein, 1064 aa, Rhodopseudomonas palustris
MSECVTRRILGIDLGIASCGWGVIEVGEASGSIIASGVRCFDAPLIDKTGEPKSATRRTARGQRRIIRRRRQRMNAVRRLLAEFGVLTGRSPDALHQALLRLSQSVAGSQVTPWTLRAAAHERKLTNDELAVVLGHIARHRGFRSNSKNDGGANAADETSKMKKAMETTREGLARYHSFGAMIASDPKFADRKRNRDKDYSHTAKRSDLEDEVRTIFRSQTRFGSLVASEKLSQAFADAAFFQRPLQDSEDMVGSCPFEPGQKRTARRAPSFELFRFLSRLANLKLTVGRAPERRLTPDEIALAAKGFGETKKSITFKSLREALDLDPNARFSGVAKEKESTLDVAARTGGAAYGTKTLKDALGDAPWRSLSRMPEKLDRIAEILSFREDMKAIRNGLEEVGLDGLVVDALMQATANGDFKDFTRAAHISALAARNIIPGLREGLVYSDACTRVGYDHAARPAVPLSQIGSPVTRKALSEALKQVRAVAREYGPIDYFHIELARSIGKSAEERKKLTDGIEARNVEKEKRRKEAAEHLGRAPSDDELLRYELAKEQNFKCIYSGDPIDPAGISANDTRYQVDHILPWSRFGDDSYVNKTLCTARSNQNKRGRTPFEWFDADKTEAEWMEYSARVEDLKEVKGRKKRNYSIKDAASVEDKFKARNLTDTQWATRLLADELKRMFPPRECERVVTVRADGGNDGLSIVEERRVFTRPGAITSKLRRAWGLEGLKKQDGKRVEDDRHHAVDALVLAATTESLLNRLTVEVQQREREGRQDDIFHCSQPWPGFRVDVQRTVYGSETMPGIFVSRAERRRARGKAHDATVKQIRDIDGERIVFERKPIEKLTDKDLERIPVPEPYGKAADPKKLRDELVENLRAWIAAGKPKDKPPRSPKGDIIRKVRIETKDKVAVEINGGTVDRGDMARVDVFRKKNKKGVWEFYVIPIYPHQIVASALPPNRAVIAYKAESEWTAIDGCFEFAWSLNPMSYLELVKSNGELIEGYFRSMDRTTGAINLSPMSTNSETIRSIGVKTLSSFRKFTVDRLGRKFEIPREVRTWRGEACT

SEQ ID NO: 409 - protein, 1173 aa, Rhodospirillum rubrum
  Rhodospirillum rubrum ATCC 11170
MRPIEPWILGLDIGTDSLGWAVFSCEEKGPPTAKELLGGGVRLFDSGRDAKDHTSRQAERGAFRRARRQTRTWPWRRDRLIALFQAAGLTPPAAETRQIALALRREAVSRPLAPDALWAALLHLAHHRGFRSNRIDKRERAAAKALAKAKPAKATAKATAPAKEADDEAGFWEGAEAALRQRMAASGAPTVGALLADDLDRGQPVRMRYNQSDRDGVVAPTRALIAEELAEIVARQSSAYPGLDWPAVTRLVLDQRPLRSKGAGPCAFLPGEDRALRALPTVQDFIIRQTLANLRLPSTSADEPRPLTDEEHAKALALLSTARFVEWPALRRALGLKRGVKFTAETERNGAKQAARGTAGNLTEAILAPLIPGWSGWDLDRKDRVFSDLWAARQDRSALLALIGDPRGPTRVTEDETAEAVADAIQIVLPTGRASLSAKAARAIAQAMAPGIGYDEAVTLALGLHHSHRPRQERLARLPYYAAALPDVGLDGDPVGPPPAEDDGAAAEAYYGRIGNISVHIALNETRKIVNALLHRHGPILRLVMVETTRELKAGADERKRMIAEQAERERENAEIDVELRKSDRWMANARERRQRVRLARRQNNLCPYTSTPIGHADLLGDAYDIDHVIPLARGGRDSLDNMVLCQSDANKTKGDKTPWEAFHDKPGWIAQRDDFLARLDPQTAKALAWRFADDAGERVARKSAEDEDQGFLPRQLTDTGYIARVALRYLSLVTNEPNAVVATNGRLTGLLRLAWDITPGPAPRDLLPTPRDALRDDTAARRFLDGLTPPPLAKAVEGAVQARLAALGRSRVADAGLADALGLTLASLGGGGKNRADHRHHFIDAAMIAVTTRGLINQINQASGAGRILDLRKWPRTNFEPPYPTFRAEVMKQWDHIHPSIRPAHRDGGSLHAATVFGVRNRPDARVLVQRKPVEKLFLDANAKPLPADKIAEIIDGFASPRMAKRFKALLARYQAAHPEVPPALAALAVARDPAFGPRGMTANTVIAGRSDGDGEDAGLITPFRANPKAAVRTMGNAVYEVWEIQVKGRPRWTHRVLTRFDRTQPAPPPPPENARLVMRLRRGDLVYWPLESGDRLFLVKKMAVDGRLALWPARLATGKATALYAQLSCPNINLNGDQGYCVQSAEGIRKEKIRTTSCTALGRLRLSKKAT

SEQ ID NO: 410 - protein, 1059 aa, Rhodovulum sp.
  Rhodovulum sp. PH10
MGIRFAFDLGTNSIGWAVWRTGPGVFGEDTAASLDGSGVLIFKDGRNPKDGQSLATMRRVPRQSRKRRDRFVLRRRDLLAALRKAGLFPVDVEEGRRLAATDPYHLRAKALDESLTPHEMGRVIFHLNQRRGFRSNRKADRQDREKGKIAEGSKRLAETLAATNCRTLGEFLWSRHRGTPRTRSPTRIRMEGEGAKALYAFYPTREMVRAEFERLWTAQSRFAPDLLTPERHEEIAGILFRQRDLAPPKIGCCTFEPSERRLPRALPSVEARGIYERLAHLRITTGPVSDRGLTRPERDVLASALLAGKSLTFKAVRKTLKILPHALVNFEEAGEKGLDGALTAKLLSKPDHYGAAWHGLSFAEKDTFVGKLLDEADEERLIRRLVTENRLSEDAARRCASIPLADGYGRLGRTANTEILAALVEETDETGTVVTYAEAVRRAGERTGRNWHHSDERDGVILDRLPYYGEILQRHVVPGSGEPEEKNEAARWGRLANPTVHIGLNQLRKVVNRLIAAHGRPDQIVVELARELKLNREQKERLDRENRKNREENERRTAILAEHGQRDTAENKIRLRLFEEQARANAGIALCPYTGRAIGIAELFTSEVEIDHILPVSLTLDDSLANRVLCRREANREKRRQTPFQAFGATPAWNDIVARAAKLPPNKRWRFDPAALERFEREGGFLGRQLNETKYLSRLAKIYLGKICDPDRVYVTPGTLTGLLRARWGLNSILSDSNFKNRSDHRHHAVDAVVIGVLTRGMIQRIAHDAARAEDQDLDRVFRDVPVPFEDFRDHVRERVSTITVAVKPEHGKGGALHEDTSYGLVPDTDPNAALGNLVVRKPIRSLTAGEVDRVRDRALRARLGALAAPFRDESGRVRDAKGLAQALEAFGAENGIRRVRILKPDASVVTIADRRTGVPYRAVAPGENHHVDIVQMRDGSWRGFAASVFEVNRPGWRPEWEVKKLGGKLVMRLHKGDMVELSDKDGQRRVKVVQQIEISANRVRLSPHNDGGKLQDRHADADDPFRWDLATIPLLKDRGCVAVRVDPIGVVTLRRSNV

SEQ ID NO: 411 - protein, 1405 aa, Riemerella anatipestifer
MKTILGLDLGTNSIGWALVKEAENSNEKSEIIKLGVRVNPLTVDEKTNFEAGRPLSTNADRTAKRSARRNLQRYKLRRKNLIDLLIKNQLIDKDTPLTEIGKNTTHQTLELRAKAARERIELEDLARVFLAINKKRGYRSSRKVNNEEEGQAVDGMAVAKKLYDENLTPGQYAYELLSKGKKYVPDFYRSDLQAEFNAIWEYQKQFYADILDDELYNALKGQGQQNSRKRFLAIKGVYTAENKGKRDDVKLRHYKWRSEAISKKINIEEVAYVLVEINNDLNKSSGYLGAISDRSKELYFNKETVGENLWKQIQKNPHTSLKNQVFYRQDYLDEFEQIWETQAQFHPQLTLALKEQIRDVIIFYQRKLKSQKGLLSFCQFESWEIERKDENGNVILNKTTQLPKRQTVGRRVAPKSSPLFQEFKIWQNINNLEVTKISEGASKNKKETETLSDDERKLLFEELNLRGNLSQKEVLQILGLKDKEYKTNFSEGLEGNRTNAALFNIYQQIAENEGYGFDWSKKSAQEIKEELKAVFPQIGIQADILDFNANLDGKEFENQASYQLWHLLYSAEEDDKINEEDQIIYGNSAVSLKKKLCEKFGFTPEYAKWIANVSLQDDYGNLSTKAMRKIIPYLIDGNDYSEACALAGYNHSNSLTKEENDNRELLDKLELLPKNSLRNPVVEKILNQMVNVVNQVIETYGKPDEVRIELARELKKSAEKRAEMTKSINEATRRNEDIKKLITKDFGIPNPTKSDVVRYRLWEELAPLAYKDVFTGKQIKKEDLFSSKIDIEHIIPKALLFDDSFSNKTLVFRETNLKKADRTAYDFIESDYNATLDDYIQRVETLYNNTKGTISKGKRNKLLMAQKNLPDGFIERDLRNSQYIAKKAKAMLYQVFKDVNVTSGSITDRLREDWDLINVMKELNFPKYKALGLTEIEERYDIGQEKTKRVEVITDWTKRNDHRHHAMNALTVAFTTSSHIQYLNYLNARKNESHKEHKNIKGIENKITHKQKDKRKFIPPMPNFREEAKKHIETILVSIKNKNKVYTKNINKTKKKSGHNTKEQLTPRGQLHKETVYGKSKRPMSKPTKINKNFSLEQAQLIINVQEKELVLRHLAQFDNNPAVAFDTKTLKKMPLLKNGEPLKEVLCFEEIFTIRKDITPDLKIEKVVDEKIKAILEQRKKDFGGNAKEAFSDLDKNPIWLNKKKGICIKRVTITGVSNAEALHHQKDHLGREILDDNGNPIPADFVSTGNNHHLAVYLDSEGKLQDNIVSFYEAVVRTSQGLPVVDKGLNKDLGWKFLFSLKQNEMFVFPNDDFDINDFDLLDDKKAELISKHLYRVQKISKVSAGNSFVRDIVFRHHLETTVKEVKELKDISYIQLKSLEGLRNIKKVRINHIGKIVQVGEY

SEQ ID NO: 412 - protein, 1400 aa, Riemerella anatipestifer
MKTILGLDLGTNSIGWALVKETENSNEKSEIIKLGVRVNPLTVDEKTNFEAGRPLSTNADRTAKRSARRNLQRYKLRRKNLIDLLIKHRLIDKDTPLTEIGKNTTHQTLELRAKAARERIELEDLARVFLAINKKRGYRSSRKVNNEEEGQVVDGMAVAKKLYDENLTPGQYAYELLSKGKKYVPDFYRSDLQAEFDSIWEYQKQFYADILDDELYNALKGQGQQNSRKRFLAIKGVYTAENKGKRDEVKLQHYKWRSEAITQKLSIEEVAYVLVEINNDLNKSSGYLGAISDRSKELYFNKETVGENLWKQIQKNPHTSLKNQVFYRQDYLDEFEQIWETQAQFHPQLTLALKEQIRDVVIFYQRKLKSQKGLLSFCQFESWEIERKDENGNVILNKTTQLPKRQTVGRRVAPKSSPLFQEFKIWQNINNLEIAKISDGNSKNKKETEALSDDERKLLFEELNLRGNLSQKEVLQILGLKDKEYKTNFPEGLEGNRTNAALFNIYQQIAENEGYGDWTKKSAQEIKEELKAVFPQIGIQADILDFNAELDGKEFENQASYQLWHLLYSAEEDDKINEEDQIIYGNSAVSLKKKLCEKFGFTPEYAKWIANVSLQDDYGNLSTKAMRKIIPYLIDGNDYSEACALAGYNHSNSLTKEENDNRERLNKLELLPKNSLRNPVVEKILNQMVNVVNQVIETYGKPDEVRIELARELKKSAEERAEMTKGINEATRRNEDIKKLITKNFGIPNPTKNDVVRYRLWEELAPLAYKDVFTGRQIKKEDLFSSKIDIEHIIPKALLFDDSFSNKTLAFRETNLKKADRTAYGFIESDYNATLDDYIQRVETLYNNAKGTISKGKRNKLLMAQKNLPDGFIERDLRNSQYIAKKAKSMIEKVFNDVNVTSGSITDRLREDWDLINVMKELNFPKYKALGLTEIEERYDIGQEKTKKVEVITDWTKRNDHRHHAMDALTVAFTTKSHVQYLNNLNTIHSLKGDEVDLELSKLYGLKNTITEVVNKKRKFIPPMPNFREEAKKHIETILVSIKNKNKVYTKNINKTKKESGYHTKEQLTPRGQLHKETVYGKSKRPMNKPTKINKNFSLEQAQLIINVQEKELVLRHLAQFDNNPAVAFDTKTLKKMPLLKNGEPLKEVLCFEEIFTIRKDITPDLKIEKVVDEKIKAILEQRKKDFGGNAKEAFSDLDKNPIWLNKEKGICIKRVTITGVSNAEALHHQKDHLGREILDDNGNPIPADFVSTGNNHHVAIYEDEKGKLQEKVVSLYEAVARANQGLPVVDKGLNEDLGWKFLFTMKQNEMFVFPNDDFDVNDIDLLDENNAKIISQHLFRVQKLATKNYMFRHHLETNVQEVKELNDIAYKSIRSTEPLKNIKKVRINHIGKIVQVGEY

SEQ ID NO: 413 - protein, 1140 aa, Roseburia intestinalis
  Roseburia intestinalis L1-82
MRENGSDERRRNMDEKMDYRIGLDIGIASVGWAVLQNNSDDEPVRIVDLGVRIFDTAEIPKTGESLAGPRRAARTTRRRLRRRKHRLDRIKWLFENQGLINIDDFLKRYNMAGLPDVYQLRYEALDRKLTDEELAQVLLHIAKHRGFRSTRKAETAAKENGAVLKATDENQKRMQEKGYRTVGEMIYLDEAFRTGCSWSEKGYILTPRNKAENYQHTMLRAMLVEEVKEIFSSQRRLGNEKATEELEEKYLEIMTSQRSFDLGPGMQPDGKPSPYAMEGFSDRVGKCTFLGDQGELRGAKGTYTAEYFVALQKINHTKLVNQDGETRNFTEEERRALTLLLFTQKEVKYAAVRKKLGLPEDILFYNLNYKKAATKEEQQKENQNTEKAKFIGMPYYHDYKKCLEERVKYLTENEVRDLFDEIGMILTCYKNDDSRTERLAKLGLVPIEMEGLLAYTPTKFQHLSMKAMRNIIPFLEKGMTYDKACEEAGYDFKADSKGTKQKLLTGENVNQTINEITNPVVKRSVSQTVKVINAIIRTYGSPQAINIELAREMSKTFEERRKIKGDMEKRQKNNEDVKKQIQELGKLSPTGQDILKYRLWQEQQGICMYSGKTIPLEELFKPGYDIDHILPYSITFDDSFRNKVLVTSQENRQKGNRTPYEYMGNDEQRWNEFETRVKTTIRDYKKQQKLLKKHFSEEERSEFKERNLTDTKYITTVIYNMIRQNLEMAPLNRPEKKKQVRAVNGAITAYLRKRWGLPQKNRETDTHHAMDAVVIACCTDGMIQKISRYTKVRERCYSKGTEFVDAETGEIFRPEDYSRAEWDEIFGVHIPKPWETFRAELDVRMGDDPKGFLDTHSDVALELDYPEYIYENLRPIFVSRMPNHKVTGAAHADTIRSPRHFKDEGIVLTKTALTDLKLDKDGEIDGYYNPQSDLLLYEALKKQLLLYGNDAKKAFAQDFHKPKADGTEGPVVRKVKIQKKQTMGVFVDSGNGIAENGGMVRIDVFRVNGKYYFVPVYTADVVKKVLPNRASTAHKPYGEWKVMEDKDFLFSLYSRDLIHIKSKKDIPIKMVNGGMEGIKETYAYYIGADISAANIQGIAHDSRYKFRGLGIQSLDVLEKCQIDVLGHVSVVRSEKRMGFS

SEQ ID NO: 414 - protein, 1128 aa, Roseburia intestinalis
  Roseburia intestinalis M50/1
MDEKMDYRIGLDIGIASVGWAVLQNNSDDEPVRIVDLGVRIFDTAEIPKTGESLAGPRRAARTTRRRLRRRKHRLDRIKWLFENQGLINIDDFLKRYNMAGLPDVYQLRYEALDRKLTDEELAQVLLHIAKHRGFRSTRKAETAAKENGAVLKATDENQKRMQEKGYRTVGEMIYLDEAFRIGCSWSEKGYILTPRNKAENYQHTMLRAMLVEEVKEIFSSQRRLGNKKATEELEEKYLEIMTSQRSFDLGPGMQPDGKPSPYAMEGFSDRVGKCTFLGDQGELRGAKGTYTAEYFVALQKINHTKLVNQDGETRNFTEEERRALTLLLFTQKEVKYAAVRKKLGLPEDILFYNLNYKKAATKEEQQKENQNTEKAKFIGMPYYHDYKKCLEERVKYLTENEVRDLFDEIGMILTCYKNDDSRTERLAKLGLVPIEMEGLLAYTPTKFQHLSMKAMRNIIPFLEKGMTYDKACEEAGYDFKADSKGTKQKLLTGENVNQTINEITNPVVKRSVSQTVKVINAIIRTYGSPQAINIELAREMSKTFEERRKIKGDMEKRQKNNEDVKKQIQELGKLSPTGQDILKYRLWQEQQGICMYSGKTIPLEELFKPGYDIDHILPYSITFDDSFRNKVLVTSQENRQKGNRTPYEYMGNDEQRWNEFETRVKTTIRDYKKQQKLLKKHFSEEERSEFKERNLTDTKYITTVIYNMIRQNLEMAPLNRPEKKKQVRAVNGAITAYLRKRWGLPQKNRETDTHHAMDAVVIACCTDGMIQKISRYTKVRERCYSKGTEFVDAETGEIFRPEDYSRAEWDEIFGVHIPKPWETFRAELDVRMGDDPKGFLDTHSDVALELDYPEYIYENLRPIFVSRMPNHKVTGAAHADTIRSPRHFKDEGIVLTKTALTDLKLDKDGEIDGYYNPQSDLLLYEALKKQLLLYGNDAKKAFAQDFHKPKADGTEGPVVRKVKIQKKQTMGVFVDSGNGIAENGGMVRIDVFRVNGKYYFVPVYTADVVKKVLPNRASTANKPYSEWRTMEDKDFLFSLYSRDLVHIKSKKGIPIKNVDGSLGESKEVYAYYIGADISGAKIEGKAHDSRYTFRGIGVQKLELIEKCQVDILGHISTVKNEKRMGFS

SEQ ID NO: 415 - protein, 1152 aa, Roseburia inulinivorans
  Roseburia inulinivorans DSM 16841
MNAEHGKEGLLIMEENFQYRIGLDIGITSVGWAVLQNNSQDEPVRITDLGVRIFDVAENPKNGDALAAPRRDARTTRRRLRRRRHRLERIKFLLQENGLIEMDSFMERYYKGNLPDVYQLRYEGLDRKLKDEELAQVLIHIAKHRGFRSTRKAETKEKEGGAVLKATTENQKIMQEKGYRTVGEMLYLDEAFHTECLWNEKGYVLTPRNRPDDYKHTILRSMLVEEVHAIFAAQRAHGNQKATEGLEEAYVEIMTSQRSFDMGPGLQPDGKPSPYAMEGFGDRVGKCTFEKDEYRAPKATYTAELFVALQKINHTKLIDEFGTGRFFSEEERKTIIGLLLSSKELKYGTIRKKLNIDPSLKFNSLNYSAKKEGETEEERVLDTEKAKFASMFWTYEYSKCLKDRTEEMPVGEKADLFDRIGEILTAYKNDDSRSSRLKELGLSGEEIDGLLDLSPAKYQRVSLKAMRKMQPYLEDGLIYDKACEAAGYDFRALNDGNKKHLLKGEEINAIVNDITNPVVKRSVSQTIKVINAIIQKYGSPQAVNIELAREMSKNFQDRTNLEKEMKKRQQENERAKQQIIELGKQNPTGQDILKYRLWNDQGGYCLYSGKKIPLEELFDGGYDIDHILPYSITFDDSYRNKVLVTAQENRQKGNRTPYEYFGADEKRWEDYEASVRLLVRDYKKQQKLLKKNFTEEERKEFKERNLNDTKYITRVVYNMIRQNLELEPFNHPEKKKQVWAVNGAVTSYLRKRWGLMQKDRSTDRHHAMDAVVIACCTDGMIHKISRYMQGRELAYSRNFKFPDEETGEILNRDNFTREQWDEKFGVKVPLPWNSFRDELDIRLLNEDPKNFLLTHADVQRELDYPGWMYGEEESPIEEGRYINYIRPLFVSRMPNHKVTGSAHDATIRSARDYETRGVVITKVPLTDLKLNKDNEIEGYYDKDSDRLLYQALVRQLLLHGNDGKKAFAEDFHKPKADGTEGPVVRKVKIEKKQTSGVMVRGGTGIAANGEMVRIDVFRENGKYYFVPVYTADVVRKVLPNRAATHTKPYSEWRVMDDANFVFSLYSRDLIHVKSKKDIKTNLVNGGLLLQKEIFAYYTGADIATASIAGFANDSNFKFRGLGIQSLEIFEKCQVDILGNISVVRHENRQEFH

SEQ ID NO: 416 - protein, 1156 aa, Ruminococcus albus
  Ruminococcus albus 8
MGNYYLGLDVGIGSIGWAVINIEKKRIEDFNVRIFKSGEIQEKNRNSRASQQCRRSRGLRRLYRRKSHRKLRLKNYLSIIGLTTSEKIDYYYETADNNVIQLRNKGLSEKLTPEEIAACLIHICNNRGYKDFYEVNVEDIEDPDERNEYKEEHDSIVLISNLMNEGGYCTPAEMICNCREFDEPNSVYRKFHNSAASKNHYLITRHMLVKEVDLILENQSKYYGILDDKTIAKIKDIIFAQRDFEIGPGKNERFRRFTGYLDSIGKCQFFKDQERGSRFTVIADIYAFVNVLSQYTYTNNRGESVFDTSFANDLINSALKNGSMDKRELKAIAKSYHIDISDKNSDTSLTKCFKYIKVVKPLFEKYGYDWDKLIENYTDTDNNVLNRIGIVLSQAQTPKRRREKLKALNIGLDDGLINELTKLKLSGTANVSYKYMQGSIEAFCEGDLYGKYQAKFNKEIPDIDENAKPQKLPPFKNEDDCEFFKNPVVFRSINETRKLINAIIDKYGYPAAVNIETADELNKTFEDRAIDTKRNNDNQKENDRIVKEIIECIKCDEVHARHLIEKYKLWEAQEGKCLYSGETITKEDMLRDKDKLFEVDHIVPYSLILDNTINNKALVYAEENQKKGQRTPLMYMNEAQAADYRVRVNTMFKSKKCSKKKYQYLMLPDLNDQELLGGWRSRNLNDTRYICKYLVNYLRKNLRFDRSYESSDEDDLKIRDHYRVFPVKSRFTSMFRRWWLNEKTWGRYDKAELKKLTYLDHAADAIIIANCRPEYVVLAGEKLKLNKMYHQAGKRITPEYEQSKKACIDNLYKLFRMDRRTAEKLLSGHGRLTPIIPNLSEEVDKRLWDKNIYEQFWKDDKDKKSCEELYRENVASLYKGDPKFASSLSMPVISLKPDHKYRGTITGEEAIRVKEIDGKLIKLKRKSISEITAESINSIYTDDKILIDSLKTIFEQADYKDVGDYLKKTNQHFFTTSSGKRVNKVTVIEKVPSRWLRKEIDDNNFSLLNDSSYYCIELYKDSKGDNNLQGIAMSDIVHDRKTKKLYLKPDFNYPDDYYTHVMYIFPGDYLRIKSTSKKSGEQLKFEGYFISVKNVNENSFRFISDNKPCAKDKRVSITKKDIVIKLAVDLMGKVQGENNGKGISCGEPLSLLKEKN

SEQ ID NO: 417 - protein, 1341 aa, Ruminococcus lactaris
  Ruminococcus lactaris ATCC 29176
MGKGYYVGLDMGTGSVGWAVTDESYQILRRHGKAMWGVRLFESAKTAEERRMFRTGRRRLDRRGWRIEILQEIFAEEISRVDPGFFLRMKESKYYPEDKRDIQGNCPELPYTLFVDKTFTDKDFHKKYPTIYHLRKMLMETEDTPDMRLVYLALHHMMKHRGHFLLSGDISQVTEFKNTFNQFIENIRNEEMDFEIELDESAVQMIEETLKDKNLTRSAKKSKLVKGLNAKNVRDKAFLTLLSGGTVKLSDLFGMEELNEGERPKISFADNGYEEYAAVVEMELGELYYIVESAKAVYDWAILSDILGGSTSVSDAKVRAYEKHKADLKYLKAVVKEYFPKEVYNAVFVESSDKLNNYPAYIGMTKKNGKKVSLEGKRCSREEFMDFLKKNIVVKLPDEEAKMYLQSELEKDSFLPKQVNKDNGVIPYQVHKYELKKILDNLGDKIPFLKENAEKIEKLFSFRIPYYVGPLRTGNGENSKFAWAERKSTEKIYPWNFENVIDVEQSAENFIRRMTNKCTYLIGEDVLPKDSLLYSKFMVLNELNNLRLDGQKISVELKQKIYRDVFCRSRKVTQKKLKSYLIREGIAGKNVELTGIDGDFKGSLTAYHDFKEKLIDVELTQKEKEEIILNIVLFGDDKKLLKQRLKKKFPQLTEKQINTVTALSYKGWGRLSKKLLEEVTVPAPETGEVWNIITALWETNDNFMQLLSKEYQFSDRIEEFNEEKADPEVSYQTIEDLYVSPAVKRQIWQTLQIIQEIEKVMGEKPKRVFVEMAREKQENKRTESRKKTLSDLYTKCKKEEPEWIEALCTSLEKHEEHQLRSDKLYLYYTQKGRCMYSGEPIDLEDLWDNTKYDIDHIYPQSKTMDDSLKNRVLVKKEYNAKKSDTYPIAADIQKKMMPFWKSLLTGGFIPKEKYDRLVRNNPLDANELAGFIERQIVETRQSTKAVAEILKKILPDTEIVYVKAKTVSKFRQDFDFIKVRDMNDLHHAKDAYLNIVVGNVYFVKFTKNAAWFVKENPGRTYNLEKMFIWDVARDGEIAWKAGKSGSIVQVRAMMEKNHILVTRRSYEVKGGLFDQQILKKGKGQVPVKESDERLRDIGKYGGYNKAAGVYFMLVSSKDKKGKEQRTIEFVPIYLKDRVEKDMESARNYLMEERGLREPKILIKKIKIDTLFKVDGFYMWLSGRTSNQLIFKGANQLILSKEDMKTLKKVVKYIQRQKEDKNVKISMRDGITEEELLKLYETFLDKIRHSIYGARLSSQEKTLVNGKEKFIDLSVEAKCQVLYEILHLFQCQSGAANLKMIGGPASAGILVMNNNISKCKNISIVNQSPTGIYEKEIDLLRV

SEQ ID NO: 418 - protein, 1471 aa, Scardovia wiggsiae
  Scardovia wiggsiae F0424
MGYKAPRNDKGEIDYGVGLDLGNGSVGWVAMDKDYHLIRARGHELIGARLFDPANSAENRRESRTTRRRLSRRRWRLRMLDSLFASELAKIDPNFLARRKYSWVHPKDEQNHENWYGSIIFGSKEQDKQFYKDYPTIYHLRKKLTEDTERHDIREIYVAIHHIVKYRGHFLREGEINSENLFDPEGFVELIKDVIKLNNSYDESTPIFEASPADVSEALLNEHTSRSGRIEDTLDKLDFSVSRVDKHELKGMRDAAKAVIGAIVGNTADFSKIFNLDNLDKDSKDNLKLKFADSNFDEKYGGVVGSGLLDETQIELVDRIHAVYDAVALKGILGDAHTISEAKVESYEKHRKNWKLIKEELRTKENKDEVDLWYGDLSGRQYKNPPDPEKGPDEGSKKDSPIRDSDQKQNLIKKANDYFTELIDDSQLSEEQKNCLKNDINNGQLFPVQRSSDNGVIPYQIHLNELRRIIENQKQYYPFLAETFIRKTAEGKSYEENKIVALLKFRVPYYVGPLVSKEDMEEHSSGNSAYHWMARNPGRGEAITPWNFDEVVDKDESGARFISRLTGTDTYLLGEPTLPQHSLLYEEYMVLSELNNVRLNVRQGNHWSDKNRQRLSYKQKEFLIENLFKEHKTVTRKRAEDCLSSMGCGEVQLFGLSDEKKFASSLSSYITLKKILGKAFVDDSGNSAILERIIEVQTVFEDREPLTHQLSLIDSLTVEQRKQLAKIHYTGWGKLSRKLLTSKKGSYKIHSQNEIMRTQHSIIDIMRGDSLNLIEIIRDKKIGIGEWIDNENLDRETGESDVSRLESVFEGIVMSPRVKRGVVQAVRVIDDLAKAIGNPPQRIFIEMADEVQASQRTVSRLSRLKALYGSPSLQKEFNDLKDLRKSLNETKDADLQEDRLYLYYIQLGKDLYTGKEISIDSLSSAYDIDHIVPQALTQDDSIDNRVLVSRKENARKTDSYLYTPDLIKNMRPLWGKLLAAGLMSQKKYDALTRVDDFKDREKQRFVQRSLVETRQIMKNVSTILRTYYGEDTNVVTLKSSITHDMRKYLGFPYKNRDINDYHHAQDALCISAAGQFMLNRHFVSGGEVTDGASNAYNMYLAEYLQEFRDAKARGERKRSTAFGFVVGSMSSKDDEKRTDHRTGEIVWSETNAEYLRKVMNYKKMLITQKVGDVKTRALYDETRYGHKESSAKSIKFDNLRRDTSLYGGFSGASTAYMMLVEYKKKNKLVSITAQEASLLAVADQKNDTVSVMDGILASHGLSGAKILLPKIVTGQLLDYSDALVTLQSASELNTARQMWLPRNDYNDIDIILKSKDIEDAAHKLGYDSDTVHVLRRIQKLFEAVFRVAESQFPLHQLSKDQQEEILRDPQNYGFGSAVKLLGGLLKALHANAENTNLAGLVKVLHGDKEYSDDGKAKEFKKFGFSPRWRRISNPTGFTLSDSDTFIYQSPSGIFEQRVTVKELKEKADKQK

SEQ ID NO: 419 - protein, 1178 aa, Scardovia inopinata
  Scardovia inopinata F0304
MGKRHNSNMAKKKISYRIGIDVGLNSTGLAAIEVDDDGAPIRILNTMSVIHDGGVDPDAAKVRGTRLAISGIARRTRRMRRRRAKRLDRLEQILEKYGYTDTEPVLEEPYGPWICRAELADGFINDDEQRRMMIGIAIRHIARHRGWRNPYQNVRALLNIDDSDLSEEYKNLKEKVQDQINDGKDLPNFTPSQLVRDYLDNFSGQPAARIRTGKAGPRGNRRDAVGILPQRMRQSDYAYELQRIFDMQKIGRDEAQELLMAVFEAKSPKGSAEKRIGKDPLTGKKRALKASLAFQKYRIVATITNLRIKTGTGSERMLSPTELNDIYTYLLRVQDDNHLPTWEDICEEVLHIGRYQLAGIGKTFEGGERISNMPPVIQTSLAIHGLSEGTLAEKLTKWWDKADDDSRESMIKLLSNTVDIDRVNEVDENFASALDFIDSLDDEELTKLDKIALPRGRAAYSEEALNKLTADMLNTGDDLFSARQRIYHVNNSWRPPQPPIGEPLGNPAVDRVLKITNRYLMNCLNRWGQPRRVTIEHTRSGFTSVKQATEHQKISDKRAEYRRDIVKQLEEAGVESVHEYDIRRWEAVQRQNGQCLYCGRDITFKTCEMDHIVPRKGPGSTNTRTNFAAVCPECNRMKSNIPFASWAETKEAKDRGVSLDKAIKQVRFFNFTKNEYSPQAQRNFKKSMIERLKQKTSDEPLDNRSIESVSWMADELYKRIDWYFNHEQYETSKKAINDDKDNLSGTQVVVYPGSITAEARNAAGLGGNIHFIGGRYKTRLDRRHHAVDACVIAMMEPGIARILTERNQLRQAQRLTARIEDDEVNWKDYPTENTAGYNKYQAWSDRMHALLEYMNNALDYDKIPVVRWERLQLGNRSAHEDTIHPLKKLPLSHEISAIDINHASTPALYEALVSLPDFSEQDGLPADPSRQINVNGERYSGDDLVSFFNSNAAQIAIQGGSAELGTAFHHARIYRCWTVGKNGKKKIFFGMIRVYQHDLLHAKNEDLFTYPLKRSSVSMRYAKKEVVHAILSGNAEYVGYLCVGDELVLDLKGDKSNDEGGSRLSGQVGEFVQKFEEDSKVNSQIVNRWTVDGFPDEAKLRLRPSMFAGEGLKNMKSELVENAAIKNILSKTGWRVSVDVISKKSPVVLRRNAFGEPRWKTNAGLPVSYRWQDTETKE

SEQ ID NO: 420 - protein, 1063 aa, Simonsiella muelleri
  Simonsiella muelleri ATCC 29453
MEKFHYVLGLDLGIASVGWAAIEIDKETETSIGLLDCGVRTFERAEVPKTGDSLAKARREARSTRRLIRRRSHRLLRLKRLLKREIFRQPETFKDLPINAWQLRVKGLDSRLNEYEWAAVLLHLVKHRGYLSQRKSEMSETDSKSEMGRLLAGVAENHQLLQQEQYRTPAELALKKFVKHFRNKGGDYAHTFNRLDLQAELHLLFQKQRELGNPFTSPELERQVDDLLMTQRSALQGDAILKMLGHCGFEPEQFKAAKNTFSAERFIWLTKLNNLRIQDQGKERALTADERTKLLDEPYKKSKLTYAQVRKLLSLPQTAIFKGLRYDLEHDKKAENSTLMEMKSYHNIRQTLEKSGLKTEWQSIATQPEILDAIGTAFSIYKTDEDISHELKTCRLPENVLNELLKNINFDGFIQLSLTALRKILPLMEQGYRYDEACTQIYGNHHSGSLQQESKQFLPHIPIDDVRNPVVFRTLTQARKVVNAIIRRYGSPARVHIEMARELGKSKSDRDRIEKQQQKNKKERENAVAKFKEDFPDFVGEPRGKDILKMRLYEQQHGKCLYSGHDIDINRLNEKGYVEIDHALPFSRTWDDSQNNKVLVLGSENQNKRNQTPDEYLDGANNSQRWLEFQARVQTCHFSYGKKQRIQLAKLDDETEKGFLERNLNDTRYIARFMCQFVQENLYLTGKGKRLVFASNGGMTATLRNLWGLRKVREDNDRHHALDAIVVACSTASMQQKITKAFQRHESIEYVDTETGEVKFRIPQPWDFFRQEVMIRVFSDQPCEDLVEKLSARPEALHDNVTPLFVSRAPNRKMSGQGHLETIKSAKRLSEENSMVKKPLTTLKLKDIPEIVGYPSREPQLYAALKTRLETHDDDPIKAFAKPFYKPNKNGELGALVRSVRVKGVQNTGVMVHDGKGIADNATMVRVDVYTKAGKNYLVPVYVWQVAQGILPNRAVTSGKSEADWDLIDESFEFKFSLSRGDLVEMISNKGRIFGYYNGLDRANGSIGIREHDLEKSKGKDGVHRVGVKTATAFNKYHVDPLGKEIHRCSSEPRPTLKIKSKK

SEQ ID NO: 421 - protein, 1327 aa, Solobacterium moorei
  Solobacterium moorei F0204
MEGQMKNNGNNLQQGNYYLGLDVGTSSVGWAVTDTDYNVLKFRGKSMWGARLFDEASTAEERRTHRGNRRRLARRKYRLLLLEQLFEKEIRKIDDNFFVRLHESNLWADDKSKPSKFLLFNDTNFTDKDYLKKYPTIYHLRSDLIHNSTEHDIRLVFLALHHLIKYRGHFIYDNSANGDVKTLDEAVSDFEEYLNENDIEFNIENKKEFINVLSDKHLTKKEKKISLKKLYGDITDSENINISVLIEMLSGSSISLSNLFKDIEFDGKQNLSLDSDIEETLNDVVDILGDNIDLLIHAKEVYDIAVLTSSLGKHKYLCDAKVELFEKNKKDLMILKKYIKKNHPEDYKKIFSSPTEKKNYAAYSQTNSKNVCSQEEFCLFIKPYIRDMVKSENEDEVRIAKEVEDKSFLTKLKGTNNSVVPYQIHERELNQILKNIVAYLPFMNDEQEDISVVDKIKLIFKFKIPYYVGPLNTKSTRSWVYRSDEKIYPWNFSNVIDLDKTAHEFMNRLIGRCTYTNDPVLPMDSLLYSKYNVLNEINPIKVNGKAIPVEVKQAIYTDLFENSKKKVTRKSIYIYLLKNGYIEKEDIVSGIDIEIKSKLKSHHDFTQIVQENKCTPEEIERIIKGILVYSDDKSMLRRWLKNNIKGLSENDVKYLAKLNYKEWGRLSKTLLTDIYTINPEDGEACSILDIMWNTNATLMEILSNEKYQFKQNIENYKAENYDEKQNLHEELDDMYISPAARRSIWQALRIVDEIVDIKKSAPKKIFIEMAREKKSAMKKKRTESRKDTLLELYKSCKSQADGFYDEELFEKLSNESNSRLRRDQLYLYYTQMGRSMYTGKRIDFDKLINDKNTYDIDHIYPRSKIKDDSITNRVLVEKDINGEKTDIYPISEDIRQKMQPFWKILKEKGLINEEKYKRLTRNYELTDEELSSFVARQLVETQQSTKALATLLKKEYPSAKIVYSKAGNVSEFRNRKDKELPKFREINDLHHAKDAYLNIVVGNVYDTKFTEKFFNNIRNENYSLKRVFDFSVPGAWDAKGSTFNTIKKYMAKNNPIIAFAPYEVKGELFDQQIVPKGKGQFPIKQGKDIEKYGGYNKLSSAFLFAVEYKGKKARERSLETVYIKDVELYLQDPIKYCESVLGLKEPQIIKPKILMGSLFSINNKKLVVTGRSGKQYVCHHIYQLSINDEDSQYLKNIAKYLQEEPDGNIERQNILNITSVNNIKLFDVLCTKFNSNTYEIILNSLKNDVNEGREKFSELDILEQCNILLQLLKAFKCNRESSNLEKLNNKKQAGVIVIPHLFTKCSVFKVIHQSITGLFEKEMDLLK

SEQ ID NO: 422 - protein, 1179 aa, Sphaerochaeta globosa
MSKKVSRRYEEQAQEICQRLGSRPYSIGLDLGVGSIGVAVAAYDPIKKQPSDLVFVSSRIFIPSTGAAERRQKRGQRNSLRHRANRLKFLWKLLAERNLMLSYSEQDVPDPARLRFEDAVVRANPYELRLKGLNEQLTLSELGYALYHIANHRGSSSVRTFLDEEKSSDDKKLEEQQAMTEQLAKEKGISTFIEVLTAFNTNGLIGYRNSESVKSKGVPVPTRDIISNEIDVLLQTQKQFYQEILSDEYCDRIVSAILFENEKIVPEAGCCPYFPDEKKLPRCHFLNEERRLWEAINNARIKMPMQEGAAKRYQSASFSDEQRHILFHIARSGTDITPKLVQKEFPALKTSIIVLQGKEKAIQKIAGFRFRRLEEKSFWKRLSEEQKDDFFSAWTNTPDDKRLSKYLMKHLLLTENEVVDALKTVSLIGDYGPIGKTATQLLMKHLEDGLTYTEALERGMETGEFQELSVWEQQSLLPYYGQILTGSTQALMGKYWHSAFKEKRDSEGFFKPNTNSDEEKYGRIANPVVHQTLNELRKLMNELITILGAKPQEITVELARELKVGAEKREDIIKQQTKQEKEAVLAYSKYCEPNNLDKRYIERFRLLEDQAFVCPYCLEHISVADIAAGRADVDHIFPRDDTADNSYGNKVVAHRQCNDIKGKRTPYAAFSNTSAWGPIMHYLDETPGMWRKRRKFETNEEEYAKYLQSKGFVSRFESDNSYIAKAAKEYLRCLFNPNNVTAVGSLKGMETSILRKAWNLQGIDDLLGSRHWSKDADTSPTMRKNRDDNRHHGLDAIVALYCSRSLVQMINTMSEQGKRAVEIEAMIPIPGYASEPNLSFEAQRELFRKKILEFMDLHAFVSMKTDNDANGALLKDTVYSILGADTQGEDLVFVVKKKIKDIGVKIGDYEEVASAIRGRITDKQPKWYPMEMKDKIEQLQSKNEAALQKYKESLVQAAAVLEESNRKLIESGKKPIQLSEKTISKKALELVGGYYYLISNNKRTKTFVVKEPSNEVKGFAFDTGSNLCLDFYHDAQGKLCGEIIRKIQAMNPSYKPAYMKQGYSLYVRLYQGDVCELRASDLTEAESNLAKTTHVRLPNAKPGRTFVIIITFTEMGSGYQIYFSNLAKSKKGQDTSFTLTTIKNYDVRKVQLSSAGLVRYVSPLLVDKIEKDEVALCGE

SEQ ID NO: 423 - protein, 1426 aa, Sphingobacterium spiritivorum
  Sphingobacterium spiritivorum ATCC 33861
MKHILGLDLGTNSIGWALIKQDFENKQGEILGMGSRIIPMSQDILGDFGKGNSVSQTAERTKYRSVRRLRERFLLRRERLHRILNVLGFLPEHYASQIDFTKRFGKFKEETEPKLVYSNEGFIFKKSFEEMLSDFKTHQPQLLEDNKKIPYDWTIYYLRKKALSRKIEKEELAWILLNFNQKRGYYQLRGEEEEENPNKLIEFYSLKIVDVLADEPQKGKSDIWYSLILENGWIYRRSSKTPLFDWKEKTRDFIVTIDLNDDGSVKTDKEGNEKRSFRAPGENDWTLVKKKTEQEIDSSRKTVGTYIYETLLKNPKQKIKGKLVRTIERKFYKTELKQILEKQKEFHPELRQDDLYSDCVRELYKNNEAHQLTLSKKDFVHLFMEDIIFYQRPLGSQKSSISNCTLEFRKYKDENGTEHTQYLKAIPKSNPYYQEFRIWQWMYNLNIYKKEDDTNVTKDFLNTKADFESLFEFLNNRKEVDQKALLKHFKLNDKTHRWNYVEDKKYPCNETKTMILSRLDKVENISDDFLTREMEQKIWHIIYSVNDKVEYEKALKSFAGKNNLEDNSFFEAFKKFPPFKSEYGAFSEKAIKKLLPLMRMGKFWNYNNISEQSKSRIQKIITGEYDENIKDKVREKAIHLTTETDFQGLQLWLVQYIVYGRHSEAAMLGKWNSADDLEEFLKEFKQHSLRNPIVEQVITETLRVVKDIWQKYGNGAKDFFREIHIELGREMKLPAEERERLTRQISENENTNFRIKALLAEMMDDNSVENVRPFSPMQQEILKIYEEGVLNSDIEIEDDILKISKTAQPSSSDLKRYKLWLEQKYKSPYTGQIIPLNKLFTPEYEIEHIIPQSRYFDDSFTNKIICESAVNKLKDNYIGLEFIKKLGGSIVECGNGKSVAILKHDAYEDFIKKHYANNRSKRNKLLLEDIPEKMIERQMNDTRYISKYISGVLSNIVRVEDGTDEGVNSKNIVPGNGKITTQLKQDWGLNDVWNDLILPRFERMNHLTNSTDFTAWNENHQKFLPTVPVEFSKGFSKKRIDHRHHALDALVIACATKDHVNLLNNQSAKSDTKRYDLKKKLMKFEKVAYNHPQTGERIEREAPKQFLKPWETFTIDAKNHLETIIVSFKQNLRVINKATNYYEKYVEKEGTKVKERVEQKGTNWAIRKPMHKETVSGKIDLPRIKVPKGKILTATRKSLDTSFNLKTIGSITDTGIQKILKNYLQYKDNNPELAFSPEGIEDMNKNIEKFNNGKAHQSISKVRVFELGSKFPLGQSGNKKEKYVEAAKGTNLFFAIYQDKNGKRSYETIPLNEVIERQKQGLSVVDLKGVDDFYLSPNDLVYVPSEDELENISMIDFNKMSSERIYKVVSFTGNQIFFVRQDIATSVVNKAEFSTLNKMERAIDGTMIKETCVKLQIDRLGNISKI

SEQ ID NO: 424 - protein, 1110 aa, Sphingobium sp.
  Sphingobium sp. AP49
MAEGKKRIWRLGADLGANSLGWAAIELSAPVNGKPIAILAAGSRIFSDGRDPKSGASLAVDRRDARAMRRRRDRFKQRQKALIKYLIADGLFPADEAARNAMAAIDPYAVRARALDEALSLPELGRALFHLNQRRGFKSNRKADRKADDDAGKIAIGIDRTRDAIAEDEADAGAEPGSWTFGKWLHERRLKGQSVRTRLRPESGEDAKGDGYDFYPDRALMEEEFDAIWAAQAPHHPDVLTNDVHDRLHEIIFYQRPLKAPQVGMCSLIPGDRRLPKAHPLFQRRRLLEELNALMIVRPGEVAQRLTREERDILLLKLKDKNKVSFATLRKALKLDPDARFNKESEDRTDLKGDEVAAVMGSKTRFGNLWVHLSIEAQWDVLARLDAVESDAEDAAFCAWLVETYALTPEQARAVANAPLPPGYGRFGETATRKLIEALRDGKKDDRVLVYSEAVTEAGLGHHSDRRTGEVFEDAKGRPQLPYYGVALERHIMPGTGDPSDPEEMRVGRLTNPTVHIGLNQLRRILNVLIRAYGPPAEIAIELARELKLTDEDKKRINRENNDNRIAAERRSEKLLAIGQADSGANRALLKLWEELNPANVLDRRCIYSGRQISIDMLFSAAVEVDHILPFAATLDDSNGNKIVCLREANREKRKRSPHDAWGHSARWDEIAARAAQLPRNKRWRFEPDAMDKFRDEGGFQARHLVDTQYLARLSREYLATLYPEKGEGSGHIWVSPGRLTEMVRRKLGLNDLLPDHNFGGGADQAKNRLDHRHHAIDAVVVAIVDRGMLNAIARASGQEGAEGRERIIIPEPWDGFRDALRETVNRITVSHRTDHGTASKAGLPKGKDATAGRLHNDTAYGFTGDTDAKGNSIVVRRVPLSSFKKLADLDRIRDADLKAALYQHLNGLEGKAFEKALAEFHKLEWHNFGGVRRVRVTEPLTVIPIKDRNGRIYKGYKGDSNYRYDVWELPDGKWVTNWKNEAGEAMSSVISMFDAHQSSEPPRPHPAARKILSLHQNDLLAIEREGEDRKLMRVVKFGQSGQITLAEHQQAGDLKKRDAVSNDDDPFKYFAPTSGGLKKVKARQVRIDEIGRVLDPGFPARTARRKTRG

SEQ ID NO: 425 - protein, 1090 aa, Sphingomonas sp.
  Sphingomonas sp. S17
MDWRLGLDLGANSLGWAALRLDRAGDPIGILAMGSRIFSDGRDPKSGASLAVDRRAARAMRRRRDRFKQRQAALLKYLIRDGLFPADQADRQRLADEDPYALRARALDEELSLFEIGRALFHLNQRRGFQSNRKADRGQDDEAGKIAVGVDRLNQQMEEQGARTLGEFLHQRRRAATDANHIPSVRTRLRPETGEGAKGDGYDFYPSRALIAEEFEEIWAAQAPHYPDTLTQQVHDRLYEIIFHQRPLRAPQVGQCTLVAGETRLPKAHPLFQKRRLLEEINALMIVRPGEIAQRLTPEERDTLYLKLKDKRTVSFATLRKTLKLDSAARFNKESENRTELKGDEVAAELGAKTRLGTRWQHLSGDQQWEVVHRLMALESQADEAAFRDWISQTYDLLPEQAAAVLGARLPQGHGRFGPTATTTLIDSLLHDRTEDGRVVVYSEAVQRSGLGHHSDLRHDRDDEDVTELPYYGVALERHIMPGTAEPTDPEEMRIGRLTNPTVHIGLNQLRHVVNRLIRAYGPPKEIAIELARELKLSEDEKKKRNSENRDNRLAAEGRSKKLEEIRQRDTGANRALLKLWEELNPGNVLDRRCIYTGEQISIDMLFSDRVEVDHILPFAQTLDDSNGNKLLCLREANREKRRRSPYEAWGHTDRWPDIAERASRLPKPKRWRFEPDAMQRFATEDGFLARHLVDTQYLGRLAREYLSWLYPGRGEGSGHVWVSPGRLTEMVRRKLGLNDLLPDHNFGGGADQPKNRLDHRHHAIDALVVAIVDRGMLQAIARASGQDGSEGRERIHIPAPWDGFRDDLRVAVNGIIVSHRPDHGTVAKAGLARGRDQTAGRLHNDTAYGLTGETDAKGNSIVVRRIPLSAIKKPADIARVRDPLLRNALAEFTKGLDGKAFEARIGRFHELGPLLYRGIRRVRVVETLTVIPIRDAEGRAYKGYKGDSNYRYDVWEMPDGKWRCQVVSMFDAHQSTEQARPHPAARKILSLQRNDILAIERTEGDRELVRVVKFSEKQFAVAPPHEGGSLKTRDGNADDPFRYLYPSPNTLKGWRARQVRIDELGRVLDPGFPARKSVRRTRPRAAPVD

SEQ ID NO: 426 - protein, 1084 aa, Sporolactobacillus vineae
  Sporolactobacillus vineae DSM 21990 = SL153
MKYSIGLDIGISSVGWSVINLDRERIELMGARLFDAAENPKNGSSLAAPRRDARSARRRLRRRRYRVGRVRHFIIDRGLVTRGQADQLFDWKDGDLDIWLVRVNALERLLTDREFARVLIHIAKNRGYRSNRKSEAKSGENGQVLSAIKANKELMEEKGYQTVAEMLVNEPETFAGRKRNRGGEYTHVIARSELEHEIRLIFTKQRAFGNRFATEENENTYVKIWAAQRPVATKDDILKKIGDCTFEKGEKRAPKASYAFQYFRALDKLNRLRILSVREPSRNLTDDERNLIVPALFNHDKQKYSDLRKILQLRDDQKFNELFYDPGKSLKENENKTFLSLAEQYKIRKVIRDVQGKDGLLQYRPLDIDTIAYALTVFKDDQDTRDYLSNTFVNGNGKQVLNLANRAFDAELIDGLLSLSFAKFGHLSLKALHKLIPHMEQGLSYYDACKKVGYHDNEQVGKSKQHLLPVIPADEIRNPVVVRSLSQTRKVINAIIKRYGSPTFMYIELAREMGRPYNERRDLEKQYNKNRTVNDSAIEQIHELYPEIGAPRGHDILKYKLWQQQDCKCAYSLEKIPAEKIFEPGYAEVDHIIPYSRSFDDSNSNKVLVLSRMNQEKKNRTPYEWFGGDEHRWNKFESYVNALKVNRKKKSLLTKKNMDTEEEDTFKSRHLNDTRYITRFIKSFVEDNLLFREIEGAKQHVFTVNGAYTSLMRKRWGFNKNREESDLHHSVDAVIIAVSQPFRNEVSRYFKHREISLPQLLKRTWDYFPEPWEGFVKELRARTLQDPEKLKLALESLDLDSYDPEFIDEVKPIFISRMPKRSIKGQIHDETLRRNRGKTKDGFVKIVTRTRLENIKFDKNGDFPMYGRESDPKTYQAIKQRYLENNKDKKKAFIEPLYKPAKNPNNASLIRSVKIEDKANQIVPLRDEAVAYNASIVRTEVYRNKETGKFYLAPVYVSDVFAGREPRRFIRANVPYEQWVNITDKFTFLFNLYPNDVIYIKMKKVKTTKSNINKTISWQESYFYFKGTDIHTGAITIIDHMNSFTDRVGTQGLQLFEKYQVDPLGNLSRVHGETQYGVPALSHS

SEQ ID NO: 427 - protein, 1053 aa, Staphylococcus aureus; identical to SEQ ID NO: 28
  Staphylococcus aureus subsp. aureus

SEQ ID NO: 428 - protein, 1054 aa, Staphylococcus lugdunensis
  Staphylococcus lugdunensis M23590
MNQKFILGLDIGITSVGYGLIDYETKNIIDAGVRLFPEANVENNEGRRSKRGSRRLKRRRIHRLERVKKLLEDYNLLDQSQIPQSTNPYAIRVKGLSEALSKDELVIALLHIAKRRGIHKIDVIDSNDDVGNELSTKEQLNKNSKLLKDKFVCQIQLERMNEGQVRGEKNRFKTADIIKEIIQLLNVQKNFHQLDENFINKYIELVEMRREYFEGPGKGSPYGWEGDPKAWYETLMGHCTYFPDELRSVKYAYSADLFNALNDLNNLVIQRDGLSKLEYHEKYHIIENVFKQKKKPTLKQIANEINVNPEDIKGYRITKSGKPQFTEFKLYHDLKSVLFDQSILENEDVLDQIAEILTIYQDKDSIKSKLTELDILLNEEDKENIAQLTGYTGTHRLSLKCIRLVLEEQWYSSRNQMEIFTHLNIKPKKINLTAANKIPKAMIDEFILSPVVKRTFGQAINLINKIIEKYGVPEDIIIELARENNSKDKQKFINEMQKKNENTRKRINEIIGKYGNQNAKRLVEKIRLHDEQEGKCLYSLESIPLEDLLNNPNHYEVDHIIPRSVSFDNSYHNKVLVKQSENSKKSNLTPYQYFNSGKSKLSYNQFKQHILNLSKSQDRISKKKKEYLLEERDINKFEVQKEFINRNLVDTRYATRELTNYLKAYFSANNMNVKVKTINGSFTDYLRKVWKFKKERNHGYKHHAEDALIIANADFLFKENKKLKAVNSVLEKPEIESKQLDIQVDSEDNYSEMFIIPKQVQDIKDFRNFKYSHRVDKKPNRQLINDTLYSTRKKDNSTYIVQTIKDIYAKDNTTLKKQFDKSPEKFLMYQHDPRTFEKLEVIMKQYANEKNPLAKYHEETGEYLTKYSKKNNGPIVKSLKYIGNKLGSHLDVTHQFKSSTKKLVKLSIKPYRFDVYLTDKGYKFITISYLDVLKKDNYYYIPEQKYDKLKLGKAIDKNAKFIASFYKNDLIKLDGEIYKIIGVNSDTRNMIELDLPDIRYKEYCELNNIKGEPRIKKTIGKKVNSIEKLTTDVLGNVFTNTQYTKPQLLFKRGN

SEQ ID NO: 429 - protein, 1334 aa, Staphylococcus pseudintermedius
MGRKPYILSLDIGTGSVGYACMDKGFNVLKYHDKDALGVYLFDGALTAQERRQFRTSRRRKNRRIKRLGLLQELLAPLVQNPNFYQFQRQFAWKNDNMDFKNKSLSEVLSFLGYESKKYPTIYHLQEALLLKDEKFDPELIYMALYHLVKYRGHFLFDHLKIENLTNNDNMHDFVELIETYENLNNIKLNLDYEKTKVIYEILKDNEMTKNDRAKRVKNMEKKLEQFSIMLLGLKFNEGKLFNHADNAEELKGANQSHTFADNYEENLTPFLTVEQSEFIERANKIYLSLTLQDILKGKKSMAMSKVAAYDKFRNELKQVKDIVYKADSTRTQFKKIFVSSKKSLKQYDATPNDQTFSSLCLFDQYLIRPKKQYSLLIKELKKIIPQDSELYFEAENDTLLKVLNTTDNASIPMQINLYEAETILRNQQKYHAEITDEMIEKVLSLIQFRIPYYVGPLVNDHTASKFGWMERKSNESIKPWNFDEVVDRSKSATQFIRRMTNKCSYLINEDVLPKNSLLYQEMEVLNELNATQIRLQTDPKNRKYRMMPQIKLFAVEHIFKKYKTVSHSKFLEIMLNSNHRENFMNHGEKLSIFGTQDDKKFASKLSSYQDMTKIFGDIEGKRAQIEEIIQWITIFEDKKILVQKLKECYPELTSKQINQLKKLNYSGWGRLSEKLLTHAYQGHSIIELLRHSDENFMEILTNDVYGFQNFIKEENQVQSNKIQHQDIANLTTSPALKKGIWSTIKLVRELTSIFGEPEKIIMEFATEDQQKGKKQKSRKQLWDDNIKKNKLKSVDEYKYIIDVANKLNNEQLQQEKLWLYLSQNGKCMYSGQSIDLDALLSPNATKHYEVDHIFPRSFIKDDSIDNKVLVIKKMNQTKGDQVPLQFIQQPYERIAYWKSLNKAGLISDSKLHKLMKPEFTAMDKEGFIQRQLVETRQISVHVRDFLKEEYPNTKVIPMKAKMVSEFRKKFDIPKIRQMNDAHHAIDAYLNGVVYHGAQLAYPNVDLFDFNFKWEKVREKWKALGEFNTKQKSRELFFFKKLEKMEVSQGERLISKIKLDMNHFKINYSRKLANIPQQFYNQTAVSPKTAELKYESNKSNEVVYKGLTPYQTYVVAIKSVNKKGKEKMEYQMIDHYVFDFYKFQNGNEKELALYLAQRENKDEVLDAQIVYSLNKGDLLYINNHPCYFVSRKEVINAKQFELTVEQQLSLYNVMNNKETNVEKLLIEYDFIAEKVINEYHHYLNSKLKEKRVRTFFSESNQTHEDFIKALDELFKVVTASATRSDKIGSRKNSMTHRAFLGKGKDVKIAYTSISGLKTTKPKSLFKLAESRNEL

SEQ ID NO: 430 - protein, 1334 aa, Staphylococcus pseudintermedius; identical to SEQ ID NO: 429
  Staphylococcus pseudintermedius ED99

SEQ ID NO: 431 - protein, 1112 aa, Staphylococcus simulans
  Staphylococcus simulans ACS-120-V-Sch1
MLVGLKFKQSILFENMENAEDIKESATGSDAISLSDDYYENLSEFLTDEQLNFIESANTFFMGIMLDRILKGATSISAAKVRDYKIFKSQLKLIKDIVYQNKYDKYHEFFVTSKEDMRAYQENPDAKNFGKLSKFDQYLIHSKDQYAKLMKDLKGLVPKEYTEVLNLIDEQKFLVVQNTTDNASIPYQNNVFEAENILRNQQKYYPEITEEMIGKVINLISFRIPYYVGPLTNKNGQSDFAWMIRKSDEQTLPWNFDKVIDKSKSAEKFIRRMTSKCTYLLEEDVLPKHSLLYQEMEVLNELNNVQLRGENEPKHRIHRLDPKVKQFIYHNLFQKKKNVTHKDLITLLQNSEHRNTLNKTSGQKLKVFGTQNDSKFASKLSTYNDMKAILGSVENKRQMIEELVLWITIFEDKAILKQKIGEKYPNITEKQLNQIVKLNYSGWGRLSEKLLTKEVNGRSLIDLMYSTENNFMEIITDKTLGFDCFIKNSNKVKNAKISYKDVAELRTSPALKKGIWNAIKMVREISNLFGAPEKIIIEFATEDQAKGKRQKSRSELWDDLVKKNNLKRNKEFEGLFEELKAYPDLDFSNPKLWLYIHQNGKCMYTKKPIDLERLMSDTNNQLYEIDHILPRTFVKDDSINNKVLVIQSANQKKSGDKMPLEIFDNHVLVPFWKMLYENDLISSSKLSKLMKKEFNDLDKEGFIQRQLVETRQIISHVSDFLTEEYPSTTVVPMKANVVSELRRKFDIPKIRQLNDWHHAVDAYLNGFVYQAARVFYPKVNLFEFNFKWEKVREKWRQLGEFTENNKKREFFLFKRMENYVNEYGEGMISKLIFDLDNFKFNYSRKVESTESAFYKQSAFSPKNTTAQYDSDKNKTAIYKEMKNKRGIVVSYTYVKKDQELIGYGVFNETVFEYVNNADVDMNTRALKIVRKAFPKLDIKKAQYLFSINKGDALLVNGHPFLFVSAYERINGKQLEFDIAMQRKIKQALSPYNNMTEQEKVEFYNQFAEKVIEEFRNSIGLQSRDRKVNLIKNLFNNTEKSNDSMTQSILEVLKMTKVSAERSKELKIRWNGQTPNTFIDTKNNAEIQYKSITGLKTTKPKSIFKLAESKNEL

SEQ ID NO: 432 - protein, 1370 aa, Streptococcus agalactiae
  Streptococcus agalactiae 2603V/R
MNKPYSIGLDIGTNSVGWSIITDDYKVPAKKMRVLGNTDKEYIKKNLIGALLFDGGNTAADRRLKRTARRRYTRRRNRILYLQEIFAEEMSKVDDSFFHRLEDSFLVEEDKRGSKYPIFATLQEEKDYHEKFSTIYHLRKELADKKEKADLRLIYIALAHIIKFRGHFLIEDDSFDVRNTDISKQYQDFLEIFNTTFENNDLLSQNVDVEAILTDKISKSAKKDRILAQYPNQKSTGIFAEFLKLIVGNQADFKKYFNLEDKTPLQFAKDSYDEDLENLLGQIGDEFADLFSAAKKLYDSVLLSGILTVIDLSTKAPLSASMIQRYDEHREDLKQLKQFVKASLPEKYQEIFADSSKDGYAGYIEGKTNQEAFYKYLSKLLTKQEDSENFLEKIKNEDFLRKQRTFDNGSIPHQVHLTELKAIIRRQSEYYPFLKENQDRIEKILTFRIPYYIGPLAREKSDFAWMTRKTDDSIRPWNFEDLVDKEKSAEAFIHRMTNNDFYLPEEKVLPKHSLIYEKFTVYNELTKVRYKNEQGETYFFDSNIKQEIFDGVFKEHRKVSKKKLLDFLAKEYEEFRIVDVIGLDKENKAFNASLGTYHDLEKILDKDFLDNPDNESILEDIVQTLTLFEDREMIKKRLENYKDLFTESQLKKLYRRHYTGWGRLSAKLINGIRDKESQKTILDYLIDDGRSNRNFMQLINDDGLSFKSIISKAQAGSHSDNLKEVVGELAGSPAIKKGILQSLKIVDELVKVMGYEPEQIVVEMARENQTTNQGRRNSRQRYKLLDDGVKNLASDLNGNILKEYPTDNQALQNERLFLYYLQNGRDMYTGEALDIDNLSQYDIDHIIPQAFIKDDSIDNRVLVSSAKNRGKSDDVPSLEIVKDCKVFWKKLLDAKLMSQRKYDNLTKAERGGLTSDDKARFIQRQLVETRQITKHVARILDERFNNELDSKGRRIRKVKIVTLKSNLVSNFRKEFGFYKIREVNNYHHAHDAYLNAVVAKAILTKYPQLEPEFVYGDYPKYNSYKTRKSATEKLFFYSNIMNFFKTKVTLADGTVVVKDDIEVNNDTGEIVWDKKKHFATVRKVLSYPQNNIVKKTEIQTGGFSKESILAHGNSDKLIPRKTKDIYLDPKKYGGFDSPIVAYSVLVVADIKKGKAQKLKTVTELLGITIMERSRFEKNPSAFLESKGYLNIRADKLIILPKYSLFELENGRRRLLASAGELQKGNELALPTQFMKFLYLASRYNESKGKPEEIEKKQEFVNQHVSYFDDILQLINDFSKRVILADANLEKINKLYQDNKENISVDELANNIINLFTFTSLGAPAAFKFFDKIVDRKRYTSTKEVLNSTLIHQSITGLYETRIDLGKLGED

SEQ ID NO: 433 - protein, 1377 aa, Streptococcus agalactiae
  Streptococcus agalactiae 515
MNKPYSIGLDIGTNSVGWSIITDDYKVPAKKMRVLGNTDKEYIKKNLIGALLFDGGNTAADRRLKRTARRRYTRRRNRILYLQEIFAEEMSKVDDSFFHRLEDSFLVEEDKRGSKYPIFATMQEEKYYHEKFPTIYHLRKELADKKEKADLRLVYLALAHIIKFRGHFLIEDDRFDVRNTDIQKQYQAFLEIFDTTFENNHLLSQNVDVEAILTDKISKSAKKDRILAQYPNQKSTGIFAEFLKLIVGNQADFKKHFNLEDKTPLQFAKDSYDEDLENLLGQIGDEFADLFSVAKKLYDSVLLSGILTVTDLSTKAPLSASMIQRYDEHHEDLKHLKQFVKASLPENYREVFADSSKDGYAGYIEGKTNQEAFYKYLLKLLTKQEGSEYFLEKIKNEDFLRKQRTFDNGSIPHQVHLTELRAIIRRQSEYYPFLKENQDRIEKILTFRIPYYVGPLAREKSDFAWMTRKTDDSIRPWNFEDLVDKEKSAEAFIHRMTNNDLYLPEEKVLPKHSLIYEKFTVYNELTKVRFLAEGFKDFQFLNRKQKETIFNSLFKEKRKVTEKDIISFLNKVDGYEGIAIKGIEKQFNASLSTYHDLKKILGKDFLDNTDNELILEDIVQTLTLFEDREMIKKCLDIYKDFFTESQLKKLYRRHYTGWGRLSAKLINGIRNKENQKTILDYLIDDGSANRNFMQLINDDDLSFKPIIDKARTGSHSDNLKEVVGELAGSPAIKKGILQSLKIVDELVKVMGYEPEQIVVEMARENQTTAKGLSRSRQRLTTLRESLANLKSNILEEKKPKYVKDQVENHHLSDDRLFLYYLQNGRDMYTKKALDIDNLSQYDIDHIIPQAFIKDDSIDNRVLVSSAKNRGKSDDVPSIEIVKARKMFWKNLLDAKLMSQRKYDNLTKAERGGLTSDDKARFIQRQLVETRQITKHVARILDERFNNEVDNGKKICKVKIVTLKSNLVSNFRKEFGFYKIREVNDYHHAHDAYLNAVVAKAILTKYPQLEPEFVYGMYRQKKLSKIVHEDKEEKYSEATRKMFFYSNLMNMFKRVVRLADGSIVVRPVIETGRYMGKTAWDKKKHFATVRKVLSYPQNNIVKKTEIQTGGFSKESILAHGNSDKLIPRKTKDIYLDPKKYGGFDSPIVAYSVLVVADIKKGKAQKLKTVTELLGITIMERSRFEKNPSAFLESKGYLNIRDDKLMILPKYSLFELENGRRRLLASAGELQKGNELALPTQFMKFLYLASRYNESKGKPEEIEKKQEFVNQHVSYFDDILQLINDFSKRVILADANLEKINKLYQDNKENIPVDELANNIINLFTFTSLGAPAAFKFFDKIVDRKRYTSTKEVLNSTLIHQSITGLYETRIDLGKLGED

SEQ ID NO: 434 - protein, 1370 aa, Streptococcus agalactiae; identical to SEQ ID NO: 432

SEQ ID NO: 435 - protein, 1378 aa, Streptococcus agalactiae
  Streptococcus agalactiae ATCC 13813
MNKPYSIGLDIGTNSVGWSIITDDYKVPAKKMRVLGNTDKEYIKKNLIGALLFDGGNTAADRRLKRTARRRYTRRRNRILYLQEIFAEEMSKVDDSFFHRLEDSFLVEEDKRGSKYPIFATMQEEKYYHEKFPTIYHLRKELADKKEKADLRLIYLALAHIIKFRGHFLIEDDRFDVRNTDIQKQYQAFLEIFDTTFENNDLLSQNVDVEAILTDKISKSAKKDRILARYPNQKSTGIFAEFLKLIVGNQADFKKHFNLEDKTPLQFAKDSYDEDLENLLGQIGDEFADLFSAAKKLYDSVLLSGILTVIDLSTKAPLSASMIQRYDEHHEDLKHLKQFVKASLPENYREVFADSSKDGYAGYIEGKTSQEAFYKYLLKLLTKQEGSEYLLEKIKNEDFLRKQRTFDNGSIPHQVHLTELRAIIRRQSEYYPFLKENLDRIEKILTFRIPYYVGPLAREKSDFAWMTRKTDDSIRPWNFEDLVDKEKSAEAFIHRMTNNDLYLPEEKVLPKHSLIYEKFTVYNELTKVRFLAEGFKDFQFLNRKQKETIFNSLFKEKRKVTEKDIISFLNKVDGYEGIAIKGIEKQFNASLSTYHDLKKILGKDFLDNTDNELILEDIIQTLTLFEDREMIKKRLDIYKDFFTESQLKKLYRRHYTGWGRLSAKLINGIRNKENQKTILDYLIDDGSANRNFMQLIKDAGLSFKPIIDKARTGSHSDNLKEVVGELAGSPAIKKGILQSLKIVDELVKVMGYEPEQIVVEMARENQTTAKGLSRSRQRLTTLRESLGNLKSNILEEKKPKYVKDQVENHHLSDDRLFLYYLQNGKDMYTDDELDIDNLSQYDIDHIIPQAFIKDDSIDNRVLVSSAKNRGKSDDVPSIEIVKARKMFWKNLLDAKLMSQRKYDNLTKAERGGLTSDDKARFIQRQLVETRQITKHVARILDERFNNELDSKGRRIRKVKIVTLKSNLVSNFRKEFGFYKIREVNNYHHAHDAYLNAVVAKAILTKYPQLEPEFVYGLYRRKKLSKIVREDKEEKYSEATRKMFFYSNLMNMFKRVVRLADGSIVVRPVIETGRYMGKTAWDKKKHFATVRKVLSYPQNNIVKKTEIQTGGFSKESILAHGNSDKLIPRKTKDIYLDPKKYGGFDSPIVAYSVLVVADIKKGKAQKLKTVTELLGITIMERSRFEKNTSAFLESKGYLNIRDDKLMILPKYSLFELENGRRRLLASAGELQKGNELALPTQFMKFLYLASRYNESKGKPEEIEKKQEFVNQHVSYFDDILQLINDFSNRVILADANLEKINKLYQDNKENIPVDELANNIINLFTFTSLGAPAAFKFFDKIVDRKRYTSTKEVLNSTLIHQSITGLYETRIDLGKLGEG

SEQ ID NO: 436 - protein, 1370 aa, Streptococcus agalactiae
  Streptococcus agalactiae CJB111
  MOD_RES (117)..(117): Any amino acid
MNKPYSIGLDIGTNSVGWSIITDDYKVPAKKMRVLGNTDKEYIKKNLIGALLFDGGNTAADRRLKRTARRRYTRRRNRILYLQEIFAEEMSKVDDSFFHRLEDSFLVEEDKRGSKYXIFATLQEEKDYHEKFSTIYHLRKELADKKEKADLRLIYIALAHIIKFRGHFLIEDDSFDVRNTDISKQYQDFLEIFNTTFENNDLLSQNVDVEAILTDKISKSAKKDRILAQYPNQKSTGIFAEFLKLIVGNQADFKKYFNLEDKTPLQFAKDSYDEDLENLLGQIGDEFADLFSAAKKLYDSVLLSGILTVIDLSTKAPLSASMIQRYDEHREDLKQLKQFVKASLPEKYQEIFADSSKDGYAGYIEGKTNQEAFYKYLSKLLTKQEDSENFLEKIKNEDFLRKQRTFDNGSIPHQVHLTELKAIIRRQSEYYPFLKENQDRIEKILTFRIPYYIGPLAREKSDFAWMTRKTDDSIRPWNFEDLVDKEKSAEAFIHRMTNNDFYLPEEKVLPKHSLIYEKFTVYNELTKVRYKNEQGETYFFDSNIKQEIFDGVFKEHRKVSKKKLLDFLAKEYEEFRIVDVIGLDKENKAFNASLGTYHDLEKILDKDFLDNPDNESILEDIVQTLTLFEDREMIKKRLENYKDLFTESQLKKLYRRHYTGWGRLSAKLINGIRDKESQKTILDYLIDDGRSNRNFMQLINDDGLSFKSIISKAQAGSHSDNLKEVVGELAGSPAIKKGILQSLKIVDELVKVMGYEPEQIVVEMARENQTTNQGRRNSRQRYKLLDDGVKNLASDLNGNILKEYPTDNQALQNERLFLYYLQNGRDMYTGEALDIDNLSQYDIDHIIPQAFIKDDSIDNRVLVSSAKNRGKSDDVPSLEIVKDCKVFWKKLLDAKLMSQRKYDNLTKAERGGLTSDDKARFIQRQLVETRQITKHVARILDERFNNELDSKGRRIRKVKIVTLKSNLVSNFRKEFGFYKIREVNNYHHAHDAYLNAVVAKAILTKYPQLEPEFVYGDYPKYNSYKTRKSATEKLFFYSNIMNFFKTKVTLADGTVVVKDDIEVNNDTGEIVWDKKKHFATVRKVLSYPQNNIVKKTEIQTGGFSKESILAHGNSDKLIPRKTKDIYLDPKKYGGFDSPIVAYSVLVVADIKKGKAQKLKTVTELLGITIMERSRFEKNPSAFLESKGYLNIRADKLIILPKYSLFELENGRRRLLASAGELQKGNELALPTQFMKFLYLASRYNESKGKPEEIEKKQEFVNQHVSYFDDILQLINDFSKRVILADANLEKINKLYQDNKENISVDELANNIINLFTFTSLGAPAAFKFFDKIVDRKRYTSTKEVLNSTLIHQSITGLYETRIDLGKLGED

SEQ ID NO: 437 - protein, 1370 aa, Streptococcus agalactiae
  Streptococcus agalactiae COH1
MNKPYSIGLDIGTNSVGYSVVTDDYKVPAKKMRVLGNTDKEYIKKNLIGALLFDGGNTASDRRLKRTARRRYTRRRNRILYLQEIFAEEMSKVDDSFFHRLEDSFLVEDDKRGSKYPIFATMQEEKDYHEKFPTIYHLRKELADKKEKANLRLVYLALAHIIKFRGHFLIEDDSFDVRNTDIQRQYQAFLEIFDTTFENNHLLSQNIDVEGILTDKISKSAKKDRILAQYPNQKSTGIFAEFLKLIVGNQADFKKHFNLEDKTPLQFAKDSYDEDLENLLGQIGDEFADLFSVAKKLYDSVLLSGILTVTDLSTKAPLSASMIQRYDEHREDLKQLKQFVKASLPEKYQEIFTDSSKDGYAGYIEGKTNQGAFYKYLSKLLTKQEGSEYFLEKIKNEDFLRKQRTFDNGSIPHQVHLTELKAIIRRQSEYYPFLKENLDRIEKILTFRIPYYVGPLAREKSDFAWMTRKTDDSIRPWNFEELVDKEASAEAFIHRMTNNDLYLPEEKVLPKHSLIYEKFTVYNELTKVRYKNEQGETYFFDSNIKQEIFDGVFKEHRKVSKKKLLDFLAKEYEEFRIVDVIGLDKENKAFNASLGTYHDLKKILDKDFLDNPDNESILEDIVQTLTLFEDREMIKKRLENYKDLFTESQLKKLYRRHYTGWGRLSAKLINGIRDKESQKTILDYLISDGRANRNFMQLIHDDGLSFKPIIDKAQAGSHSDNLKEVVGELAGSPAIKKGILQSLKIVDELVKVMGYEPEQVVVEMARENQTTNQGRRNTRQRYKLLEEGVKNLASDLNGNILKEYPTDNQALQNERLFLYYLQNGRDMYTGEALDIDNLSQYDIDHIVPQAFIKDDSIDNRVLVSSAKNRGKSDNVPSIDIVKARKAFWKKLLDAKLMSQRKYDNLTKAERGGLTSDDKARFIQRQLVETRQITKHVARILDERFNNELDSKGRRIRKVKIVTLKSNLVSNFRKEFGFYKIREVNDYHHAHDAYLNAVVAKAILTKYPQLEPEFVYGDYPKYNSYKTRKSATEKLFFYSNIMNFFKTKVTLADGTVVVKDDIEVNNDTGEIVWDKKKHFATVRKVLSYPQVNIVKKTEIQTGGFSKESILAHGNSDKLIPRKTKDIYLDPKKYGGFDSPIVAYSVLVVADIKKGKAQKLKTVTELLGITIMERFRFEKNPSAFLESKGYLNIRDDKLMILPKYSLFELENGRRRLLASAGELQKGNELALPTQYMKFLYLASRYNELKGKPEEIEQKQEFVVQHVSYFDDILQIINDFSNRVILADANLEKINKLYQDNKENISVDELANNIINLFTFTSLGAPAAFKFFDKIVDRKRYTSTKEVLNSTLIHQSITGLYETRIDLGKLGED

SEQ ID NO: 438 - protein, 1370 aa, Streptococcus agalactiae
  Streptococcus agalactiae FSL S3-026
MNKPYSIGLDIGTNSVGWSIITDDYKVPAKKMRVLGNTDKEYIKKNLIGALLFDGGNTAADRRLKRTARRRYTRRRNRILYLQEIFAEEMSKVDDSFFHRLEDSFLVEEDKRGSKYPIFATMQEEKYYHEKFPTIYHLRKELADKKEKADLRLIYLALAHIIKFRGHFLIEDDRFDVRNTDIQKQYQAFLEIFDTTFENNDLLSQNVDVEAILTDKISKSAKKDRILARYPNQKSTGIFAEFLKLIVGNQADFKKHFNLEDKTPLQFAKDSYDEDLENLLGQIGDEFADLFSAAKKLYDSVLLSGILTVTDLSTKAPLSASMIQRYDEHREDLKQLKQFVKASLPEKYQEIFADSSKDGYAGYIEGKTNQEAFYKYLSKLLTKQEGSEYLLEKIKNEDFLRKQRTFDNGSIPHQVHLTELRAIIRRQSEYYPFLKENLDRIEKILTFRIPYYVGPLAREKSDFAWMTRKTDDSIRPWNFEDLVDKEKSAEAFIHRMTNNDLYLPEEKVLPKHSLIYEKFTVYNELTKVRFLAEGFKDFQFLNRKQKETIFNSLFKEKRKVTEKDIISFLNKVDGYEGIAIKGIEKQFNASLSTYHDLKKILGKDFLDNTDNELILEDIVQTLTLFEDREMIRKRLDIYKDFFTESQLKKLYRRHYTGWGRLSAKLINGIRNKENQKTILDYLIDDGSANRNFMQLIKDAGLSFKPIIDKARTGSHSDNLKEVVGELAGSPAIKKGILQSLKIVDELVKVMGYEPEQIVVEMARENQTTAKGLSRLRQRLTTLRESLANLKSNILEEKKPKYVKDQVENHHLSDDRLFLYYLQNGKDMYTDDELDIDNLSQYDIDHIIPQAFIKDDSIDNRVLVSSAKNRGKSDDVPSVEIVKDCKVFWKKLLDAKLMSQRKYDNLTKAERGGLTSDDKARFIQRQLVETRQITKHVARILDERFNNELDSKGRRIRKVKIVTLKSNLVSNFRKEFGFYKIREVNNYHHAHDAYLNAVVAKAILTKYPQLEPEFVYGDYPKYNSYKTRKSATEKLFFYSNIMNFFKTKVTLADGTVVVKDDIEVNNDTGEIVWDKKKHFATVRKVLSYPQVNIVKKTEIQTGGFSKESILAHGNSDKLIPRKTKDIYLDPKKYGGFDSPIVAYSVLVVADIKKGKAQKLKTVTELLGITIMERSRFEKNPSAFLESKGYLNIRDDKLMILPKYSLFELENGRRRLLASADELQKGNELALPTQFMKFLYLASRYNELKGKPEEIEQKQEFVVQHVSYFDDILQIINDFSNRVILADANLEKINKLYQDNKENIPVDELANNIINLFTFTSLGAPAAFKFFDKIVDRKRYTSTKEVLNSTLIHQSITGLYETRIDLGKLGED

SEQ ID NO: 439 - protein, 1370 aa, Streptococcus agalactiae
  Streptococcus agalactiae GB00112
MNKPYSIGLDIGTNSVGYSVVTDDYKVPAKKMRVLGNTDKEYIKKNLIGALLFDGGNTASDRRLKRTARRRYTRRRNRILYLQEIFAEEMSKVDDSFFHRLEDSFLVEDDKRGSKYPIFATMQEEKDYHEKFPTIYHLRKELADKKEKADLRLVYLALAHIIKFRGHFLIEDDSFDVRNTDIQRQYQAFLEIFDTTFENNHLLSQNIDVEGILTDKISKSAKKDRILAQYPNQKSTGIFAEFLKLIVGNQADFKKHFNLEDKTPLQFAKDSYDEDLENLLGQIGDEFADLFSVAKKLYDSVLLSGILTVTDLSTKAPLSASMIQRYDEHREDLKQLKQFVKASLPEKYQEIFTDSSKDGYAGYIEGKTNQGAFYKYLSKLLTKQEGSEYFLEKIKNEDFLRKQRTFDNGSIPHQVHLTELKAIIRRQSEYYPFLKENLDRIEKILTFRIPYYVGPLAREKSDFAWMTRKTDDSIRPWNFEELVDKEASAEAFIHRMTNNDLYLPEEKVLPKHSLIYEKFTVYNELTKVRYKNEQGETYFFDSNIKQEIFDGVFKEHRKVSKKKLLDFLAKEYEEFRIVDVIGLDKENKAFNASLGTYHDLKKILDKDFLDNPDNESILEDIVQTLTLFEDREMIKKRLENYKDLFTESQLKKLYRRHYTGWGRLSAKLINGIRDKESQKTILDYLISDGRANRNFMQLIHDDGLSFKPIIDKAQAGSHSDNLKEVVGELAGSPAIKKGILQSLKIVDELVKVMGYEPEQVVVEMARENQTTNQGRRNTRQRYKLLEEGVKNLASDLNGNILKEYPTDNQALQNERLFLYYLQNGRDMYTGEALDIDNLSQYDIDHIVPQAFIKDDSIDNRVLVSSAKNRGKSDNVPSIDIVKARKAFWKKLLDAKLMSQRKYDNLTKAERGGLTSDDKARFIQRQLVETRQITKHVARILDERFNNELDSKGRRIRKVKIVTLKSNLVSNFRKEFGFYKIREVNDYHHAHDAYLNAVVAKAILTKYPQLEPEFVYGDYPKYNSYKTRKSATEKLFFYSNIMNFFKTKVTLADGTVVVKDDIEVNNDTGEIVWDKKKHFATVRKVLSYPQVNIVKKTEIQTGGFSKESILAHGNSDKLIPRKTKDIYLDPKKYGGFDSPIVAYSVLVVADIKKGKAQKLKTVTELLGITIMERFRFEKNPSAFLESKGYLNIRDDKLMILPKYSLFELENGRRRLLASAGELQKGNELALPTQYMKFLYLASRYNELKGKPEEIEQKQEFVVQHVSYFDDILQIINDFSNRVILADANLEKINKLYQDNKENISVDELANNIINLFTFTSLGAPAAFKFFDKIVDRKRYTSTKEVLNSTLIHQSITGLYETRIDLGKLGED

SEQ ID NO: 440 - protein, 1370 aa, Streptococcus agalactiae
  Streptococcus agalactiae H36B
  MOD_RES (9)..(9): Any amino acid
MNKPYSIGXDIGTNSVGWSIITDDYKVPAKKMRVLGNTDKEYIKKNLIGALLFDGGNTAADRRLKRTARRRYTRRRNRILYLQEIFAEEMSKVDDSFFHRLEDSFLVEEDKRGSKYPIFATLQEEKDYHEKFSTIYHLRKELADKKEKADLRLIYIALAHIIKFRGHFLIEDDSFDVRNTDISKQYQDFLEIFNTTFENNDLLSQNVDVEAILTDKISKSAKKDRILAQYPNQKSTGIFAEFLKLIVGNQADFKKYFNLEDKTPLQFAKDSYDEDLENLLGQIGDEFADLFSAAKKLYDSVLLSGILTVIDLSTKAPLSASMIQRYDEHREDLKQLKQFVKASLPEKYQEIFADSSKDGYAGYIEGKTNQEAFYKYLSKLLTKQEDSENFLEKIKNEDFLRKQRTFDNGSIPHQVHLTELKAIIRRQSEYYPFLKENQDRIEKILTFRIPYYIGPLAREKSDFAWMTRKTDDSIRPWNFEDLVDKEKSAEAFIHRMTNNDFYLPEEKVLPKHSLIYEKFTVYNELTKVRYKNEQGETYFFDSNIKQEIFDGVFKEHRKVSKKKLLDFLAKEYEEFRIVDVIGLDKENKAFNASLGTYHDLEKILDKDFLDNPDNESILEDIVQTLTLFEDREMIKKRLENYKDLFTESQLKKLYRRHYTGWGRLSAKLINGIRDKESQKTILDYLIDDGRSNRNFMQLINDDGLSFKSIISKAQAGSHSDNLKEVVGELAGSPAIKKGILQSLKIVDELVKVMGYEPEQIVVEMARENQTTNQGRRNSRQRYKLLDDGVKNLASDLNGNILKEYPTDNQALQNERLFLYYLQNGRDMYTGEALDIDNLSQYDIDHIIPQAFIKDDSIDNRVLVSSAKNRGKSDDVPSLEIVKDCKVFWKKLLDAKLMSQRKYDNLTKAERGGLTSDDKARFIQRQLVETRQITKHVARILDERFNNELDSKGRRIRKVKIVTLKSNLVSNFRKEFGFYKIREVNNYHHAHDAYLNAVVAKAILTKYPQLEPEFVYGDYPKYNSYKTRKSATEKLFFYSNIMNFFKTKVTLADGTVVVKDDIEVNNDTGEIVWDKKKHFATVRKVLSYPQNNIVKKTEIQTGGFSKESILAHGNSDKLIPRKTKDIYLDPKKYGGFDSPIVAYSVLVVADIKKGKAQKLKTVTELLGITIMERSRFEKNPSAFLESKGYLNIRADKLIILPKYSLFELENGRRRLLASAGELQKGNELALPTQFMKFLYLASRYNESKGKPEEIEKKQEFVNQHVSYFDDILQLINDFSKRVILADANLEKINKLYQDNKENISVDELANNIINLFTFTSLGAPAAFKFFDKIVDRKRYTSTKEVLNSTLIHQSITGLYETRIDLGKLGED

SEQ ID NO: 441 - protein, 1377 aa, Streptococcus agalactiae
MNKPYSIGLDIGTNSVGWSIITDDYKVPAKKMRVLGNTDKEYIKKNLIGALLFDGGNTAADRRLKRTARRRYTRRRNRILYLQEIFAEEMSKVDDSFFHRLEDSFLVEEDKRGSKYPIFATMQEEKYYHEKFPTIYHLRKELADKKEKADLRLVYLALAHIIKFRGHFLIEDDRFDVRNTDIQKQYQAFLEIFDTTFENNHLLSQNVDVEAILTDKISKSAKKDRILAQYPNQKSTGIFAEFLKLIVGNQADFKKHFNLEDKTPLQFAKDSYDEDLENLLGQIGDEFADLFSVAKKLYDSVLLSGILTVTDLSTKAPLSASMIQRYDEHHEDLKHLKQFVKASLPENYREVFADSSKDGYAGYIEGKTNQEAFYKYLLKLLTKQEGSEYFLEKIKNEDFLRKQRTFDNGSIPHQVHLTELRAIIRRQSEYYPFLKENQDRIEKILTFRIPYYVGPLAREKSDFAWMTRKTDDSIRPWNFEDLVDKEKSAEAFIHRMTNNDLYLPEEKVLPKHSLIYEKFTVYNELTKVRFLAEGFKDFQFLNRKQKETIFNSLFKEKRKVTEKDIISFLNKVDGYEGIAIKGIEKQFNASLSTYHDLKKILGKDFLDNTDNELILEDIVQTLTLFEDREMIKKCLDIYKDFFTESQLKKLYRRHYTGWGRLSAKLINGIRNKENQKTILDYLIDDGSANRNFMQLINDDDLSFKPIIDKARTGSHSDNLKEVVGELAGSPAIKKGILQSLKIVDELVKVMGYEPEQIVVEMARENQTTAKGLSRSRQRLTTLRESLANLKSNILEEKKPKYVKDQVENHHLSDDRLFLYYLQNGRDMYTKKALDIDNLSQYDIDHIIPQAFIKDDSIDNRVLVSSAKNRGKSDDVPSIEIVKARKMFWKNLLDAKLMSQRKYDNLTKAERGGLTSDDKARFIQRQLVETRQITKHVARILDERFNNEVDNGKKICKVKIVTLKSNLVSNFRKEFGFYKIREVNDYHHAHDAYLNAVVAKAILTKYPQLEPEFVYGMYRQKKLSKIVHEDKEEKYSEATRKMFFYSNLMNMFKRVVRLADGSIVVRPVIETGRYMRKTAWDKKKHFATVRKVLSYPQNNIVKKTEIQTGGFSKESILAHGNSDKLIPRKTKDIYLDPKKYGGFDSPIVAYSVLVVADIKKGKAQKLKTVTELLGITIMERSRFEKNPSAFLESKGYLNIRDDKLMILPKYSLFELENGRRRLLASAGELQKGNELALPTQFMKFLYLASRYNESKGKPEEIEKKQEFVNQHVSYFDDILQLINDFSKRVILADANLEKINKLYQDNKENIPVDELANNIINLFTFTSLGAPAAFKFFDKIVDRKRYTSTKEVLNSTLIHQSITGLYETRIDLGKLGED

SEQ ID NO: 442 - protein, 1370 aa, Streptococcus agalactiae
MNKPYSIGLDIGTNSVGWSIITDDYKVPAKKMRVLGNTDKEYIKKNLIGALLFDGGNTAADRRLKRTARRRYTRRRNRILYLQEIFAEEMSKVDDSFFHRLEDSFLVEEDKRGSKYPIFATMQEEKDYHEKFPTIYHLRKELADKKEKADLRLVYLALAHIIKFRGHFLIEDDRFDVRNTDIQKQYQAFLEIFDTSFENNHLLSQNVDVEAILTDKISKSAKKDRILAQYPNQKSTGIFAEFLKLIVGNQADFKKHFNLEDKTPLQFAKDSYDEDLENLLGQIGDEFADLFSAAKKLYDSVLLSGILTVTDLSTKAPLSASMIQRYDEHREDLKQLKQFVKASLPEKYQEIFADSSKDGYAGYIEGKTNQEAFYKYLSKLLTKQEDSEYFLEKIKNEDFLRKQRTFDNGSIPHQVHLTELKAIIRRQSEYYPFLKENQDKIEKILTFRIPYYVGPLARGNSDFAWMTRKTDDSIRPWNFEDLVDKEKSAEAFIHRMTNNDLYLPEEKVLPKHSLIYEKFTVYNELTKVRYKNEQGETYFFDSNVKQEIFDGVFKEHRKVSKKQLLDFLAKEFEEFRIVDVTGLDKENKAFNASLGTYHDLKKILDKDFLDNPDNESILEDIVQTITLFEDREMIKKRLENYKDLFTESQLKKLYRRHYTGWGRLSAKLINGIRDRESQKTILDYLISDGRANRNFMQLINDDGLSFKSIISKAQSGSHSDNLKEVVGELAGSPAIKKGILQSLKIVDELVKVMGYEPEQIVVEMARENQTTNQGRRNSRQRYKLLEDGVKNLASDLNGDILKEYPTDNQALQNERLFLYYLQNGRDMYTGEALDIDNLSQYDIDHIVPQAFIKDDSIDNRVLVSSAKNRGKSDDVPSIDIVKARKAFWKKLLDAKLISQRKYDNLTKAERGGLTPDDKAGFIQRQLVETRQITKHVARILDERFNNKVDDNNKPIRKVKIVTLKSNLVSNFRKEFGFYKIREVNNYHHAHDAYLNAVVAKAILTKYPQLEPEFVYGDYPKYNSYKTRKSATEKLFFYSNIMNFFKTKVTLADETVVVKDDIEVNNETGEIAWDKKKHFATVRKVLSYPQVNIVKKTEVQTGGFSKESILAHSNSDKLIPRKTKDIYLDPKKYGGFDSPIVAYSVLVLADIKKGKAQKLKTVKELIGITIMERERFEKNPSAFLESKGYLNIRTDKLIILPKYSLFELENGRRRLLASAGELQKGNELALPTQYMKFLYLASRYNESKGKPEEIEKKQEFVNQHVSYFDDILQLINDFSKRVILADANLEKINKLYSDNKDNTPVDELAKNIINLFTFTSLGAPAAFKFFDKSVDRKRYTSTKEVLDSTLIHQSITGLYETRIDLGKLGED

SEQ ID NO: 443 - protein, 1370 aa, Streptococcus agalactiae
  Streptococcus agalactiae STIR-CD-17
MNKPYSIGLDIGTNSVGWSIITDDYKVPAKKMRVLGNTDKEYIKKNLIGALLFDGGNTAADRRLKRTARRRYTRRRNRILYLQEIFAEEMSKVDDSFFHRLEDSFLVEEDKRGSKYPIFATMQEEKDYHEKFPTIYHLRKELADKKEKADLRLVYLALAHIIKFRGHFLIEDDRFDVRNTDIQKQYQAFLEIFDTSFENNHLLSQNVDVEAILTDKISKSAKKDRILAQYPNQKSTGIFAEFLKLIVGNQADFKKHFNLEDKTPLQFAKDSYDEDLENLLGQIGDEFADLFSAAKKLYDSVLLSGILTVTDLSTKAPLSAYMIQRYDEHREDLKQLKQFVKASLPEKYQEIFADSSKDGYAGYIEGKTNQEAFYKYLSKLLTKQEDSEYFLEKIKNEDFLRKQRTFDNGSIPHQVHLTELKAIIRRQSEYYPFLKENQDKIEKILTFRIPYYVGPLARGNSDFAWMTRKTDDSIRPWNFEDLVDKEKSAEAFIHRMTNNDLYLPEEKVLPKHSLIYEKFTVYNELTKVRYKNEQGETYFFDSNVKQEIFDGVFKEHRKVSKKQLLDFLAKEFEEFRIVDVTGLDKENKAFNASLGTYHDLKKILDKDFLDNPDNESILEDIVQTITLFEDREMIKKRLENYKDLFTESQLKKLYRRHYTGWGRLSAKLINGIRDRESQKTILDYLISDGRANRNFMQLINDDGLSFKSIISKAQSGSHSDNLKEVVGELAGSPAIKKGILQSLKIVDELVKVMGYEPEQIVVEMARENQTTNQGRRNSRQRYKLLEDGVKNLASDLNGDILKEYPTDNQALQNERLFLYYLQNGRDMYTGEALDIDNLSQYDIDHIVPQAFIKDDSIDNRVLVSSAKNRGKSDDVPSIDIVKARKAFWKKLLDAKLISQRKYDNLTKAERGGLTPDDKAGFIQRQLVETRQITKHVARILDERFNNKVDDNNKPIRKVKIVTLKSNLVSNFRKEFGFYKIREVNNYHHAHDAYLNAVVAKAILTKYPQLEPEFVYGDYPKYNSYKTRKSATEKLFFYSNIMNFFKTKVTLADETVVVKDDIEVNNETGEIAWDKKKHFATVRKVLSYPQVNIVKKTEVQTGGFSKESILAHSNSDKLIPRKTKDIYLDPKKYGGFDSPIVAYSVLVLADIKKGKAQKLKTVKELIGITIMERERFEKNPSAFLESKGYLNIRTDKLIILPKYSLFELENGRRRLLASAGELQKGNELALPTQYMKFLYLASRYNESKGKPEEIEKKQEFVNQHISYFDDILQLINDFSKRVILADANLEKINKLYSDNKDNTPVDELAKNIINLFTFTSLGAPAAFKFFDKSVDRKRYTSTKEVLDSTLIHQSITGLYETRIDLGKLGED

SEQ ID NO: 444 - protein, 1125 aa, Streptococcus anginosus
  Streptococcus anginosus 1_2_62CV
MNGLVLGLDIGIASVGVGILNKETGEIIHANSRIFPAATADSNVERRGFRQGRRLGRRKKHRSARLNNLFEEFGFITDFSAIPLNLNPYALRVKGLSEELTNEELFIALKNIIKRRGISYLDDASEDGETASNEYGKAVEENRKLLADKTPGQIQLERFEKYGQVRGDFTVVENGENHRLINVFSTSAYKKEAERILRRQQEFNVRISDEFIEAYLTILTGKRKYYHGPGNEKSRTDYGRFRTDGTTLDNIFGILIGKCTFYPDEYRAAKASYTAQEFNLLNDLNNLTVPTETKKLSPEQKRQIVEYARTAKTLGTPTLLKYIAKLVDGSIDDIKGYRIDKSDKPEMHTFDAYRKMRTLDLVNIDALSRETLDDLAHILTLNTESEGILEALNSKMPSTFTKEQIDELIQFRKKNSAVFGKGWHNFSLKLMNELISELYETSEEQMTILTRLGKQRSREISKRTKYIDEKELTEEIYNPVVAKSVRQAIKIINEATKRYGIFDNIVIEMARENNEEDAKKDYIKRQKANQDEKNASMEKAAFQYNGKKELPDSIFHGHKELATKIRLWHQQGERCLYTGKNISIRDLIHNPHQYEIDHILPLSLSFDDGLANKVLVLATANQEKGQRTPFQAIDSMDDAWSYREFKQYVRNSKSLSNKKKDYLLTEEDISKIEVKQKFIERNLVDTRYSSRVVLNTLQEFYKTNDFDTKISVVRGQFTSQLRRKWKIEKSRDTYHHHAVDALIIAASSQLRLWKKQNNPLISYKEGQFVDPETGEILSLTDDEYKELVFRPPYDYFVDTLKSKSFEDSILFSYQVDSKYNRKISDATIYGTRKAQLGKDKQEETYVLGKIKDIYSQKGYEDFIKRYNKDETQFLIYHKDPQTFEKVIEEILKTYPDKELNEKGKEIPCNPFEKYRQENGPIRKYSKKGKGPEIKSLKYYDNKLGNHIDITPVNSQNQVVLQSLKPWRTDVYFNPRTSKYELMGLKYSDLRFEKGSGSYGISPEKYNKVKAKEGVNEDSEFKFTLYKNDLILIKDTETGEQQLFRYGSRNDTSKHYVELKPYEKAKFEGNQQLMNLLGTVAKGGQCLKGINKPNLSIYKVKTDVLGNKYFIKKEGDQPQLNFKKKF

SEQ ID NO: 445 - protein, 1345 aa, Streptococcus anginosus
  Streptococcus anginosus F0211
MDQKYSIGLDIGTNSVGWAVVTDDYKVPAKKMKVLGNTDKQSIKKNLLGALLFDSGETAEATRLKRTARRRYTRRRNRLRYLQEIFAEEMNKVDENFFQRLDDSFLVDEDKRGERHPIFGNIAAEVKYHDDFPTIYHLRKHLADISQKADLRLVYLALAHMIKFRGHFLIEGQLKAENTNVQALFKDFVEVYDKTVEESHLSEMTVDALSILTEKVSKSRRLENLIAHYPAEKKNTLFGNLIALSLGLQPNFKTNFQLSEDAKLQFSKDTYEEDLEGLLGEIGDEYADLFASAKNLYDAILLSGILTVDDNSTKAPLSASMVKRYEEHQKDLKKLKDFIKVNAPDQYNAIFKDKNKKGYAGYIENGVKQDEFYKYLKGILLQINGSGDFLDKIDREDFLRKQRTFDNGSIPHQIHLQEMHAILRRQEEHYPFLKENQDKIEKILTFRIPYYVGPLARKGSRFAWAEYKADEKITPWNFDDILDKEKSAEKFITRMTLNDLYLPEEKVLPKHSLLYETFTVYNELTKVKYVNEQGEAKFFDANMKQEIFDHVFKENRKVTKDKLLNYLNKEFEEFRIVNLTGLDKENKAFNSSLGTYHDLRKILDKSFLDDKANEKTIEDIIQTLTLFEDREMIRQRLQKYSDIFTKAQLKKLERRHYTGWGRLSYKLINGIRNKENKKTILDYLIDDGYANRNFMQLINDDALSFKEEIARAQIIGDVDDIANVVHDLPGSPAIKKGILQSVKIVDELVKVMGHNPANIIIEMARENQMTDKGRRNSQQRLKLLQDSLKNLDNPVNIKNVENQQLQNDRLFLYYIQNGKDMYTGETLDINNLSQYDIDHIIPQAFIKDNSLDNRVLTRSDKNRGKSDDVPSIEVVHEMKSFWSKLLSVKLITQRKFDNLTKAERGGLTEEDKAGFIKRQLVETRQITKHVAQILDERFNTEFDGNKRRIRNVKIITLKSNLVSNFRKEFELYKVREINDYHHAHDAYLNAVVGNALLLKYPQLEPEFVYGEYPKYNSYRSRKSATEKFLFYSNILRFFKKEDIQTNEDGEIAWNKEKHIKILRKVLSYPQVNIVKKTEEQTGGFSKESILPKGESDKLIPRKTKNSYWNPKKYGGFDSPVVAYSILVFADVEKGKSKKLRKVQDMVGITIMEKKRFEKHPVDFLEQRGYRNVRLEKIIKLPKYSLFELENKRRRLLASARELQKGNELVIPQRFTTLLYHSYQIEKNYEPEHREYVEKHKDEFKELLEYISVFSRKYVLADNNLTKIEMLFSKNKDAEVSSLAKSFISLLTFTAFGAPAAFNFFGENIDRKRYTSVTECLNATLIHQSITGLYETRIDLSKLGED

SEQ ID NO: 446 - protein, 1386 aa, Streptococcus anginosus
  Streptococcus anginosus SK1138
MNQKYSIGLDIGTNSVGWAVITDDYKVPAKKMKVLGNTDKQSIKKNLLGALLFDSGETAEATRLKRTARRRYTRRRNRLRYLQEIFAEEMMQVDESFFQRLDDSFLVDEDKRGERHPIFGNIAAEVKYHDEFPTIYHLRKHLADISQKADLRLVYLALAHMIKFRGHFLIEGQLKAENTNVQALFKDFVEVYDKTVEESHLSEITVDALSILTEKVSKSRRLENLIAHYPAEKKNTLFGNLIALFLGLQPNFKTNFQLSEDAKLQFSKDTYEEDLEGLLGEVGDEYADLFASAKNLYDAILLSGILTVDDNSTKAPLSASMVKRYEEHQKDLKKFEDFIKVNALDQYNAIFKDKNKKGYAGYIESGVKQDEFYKYLKGILLQINGSGDFLDKIDREDFLRKQRTFDNGSIPHQIHLQEMHAILRRQGEHYPFLKENQDKIEKILTFRIPYYVGPLARKGSRFAWAEYKADEKITPWNFDDILDKEKSAEKFITRMTLNDLYLPEEKVLPKHSLLYETFTVYNELTKVKYVNEQGEAKFFDANMKQEIFDHVFKENRKVTKDKLLNYLNKEFEEFRIVNLTGLDKENKVFNSSLGTYHDLRKILNKSFLDNKENAQIIEDIIQTLTLFEDREMIRQRLQKYSDIFTKAQLKKLERRHYTGWGRLSYKLINGIRNKENKKTILDYLIDDGYANRNFMQLINDDALSFKEEIAKAQIIGDVDDIANVVHDLPGSPAIKKGILQSVKIVDELVKVMGHNPANIIIEMARENQTTDRGRRNSQQRLKLLQDSLKNLDNPVNIKNVENQQLQNDRLFLYYIQNGKDMYTGETLDINNLSQYDIDHIIPQAYIKDDSFDNRVLTSSSENRGKSDNVPSIEVVCARKADWMRLRKAGLISQRKFDNLTKAERGGLTENDKAGFIKRQLVETRQITKHVAQVLDARFNAKHDENKKVIRDVKIITLKSNLVSQFRKDFKFYKVREINDYHHAHDAYLNAVIGTALLKKYPKLASEFVYGEFKKYDVRKFIAKSDKEIGKATAKYFFYSNLMNFFKKEVKFADGTVVERPDIETSEDGEIAWNKQTDFKIVRKVLSYPQVNIVKKTEVQTHGLDRGKPRGLFNANPSPKPKPDSSENLVGVKRNLDPKKYGGYAGISNSYAVLVKAIIEKGVKKKETMVLEFQGISILDRITFEKDKRAFLLGKGYKDIKKIIELPKYSLFELKDGSRRMLASILSTNNKRGEIHKGNELFVPQKFTTLLYHAKRINNPINKDHIEYVKKHRDDFKELLNYVLEFNEKYVGATKNGERLKEAVADFDSKSNEEICTSFLGAVNSKNAGLFELTSLGSASDFEFLGVKIPRYRDYTPSSLLKDSTLIHQSITGLYETRIDLSKLGED

SEQ ID NO: 447 - protein, 1396 aa, Streptococcus anginosus
  Streptococcus anginosus SK52 = DSM 20563
MTKPYSIGLDIGTNSVGWAVITDDYKVPAKKMKVLGNTNRDYIKKNLLGALLFDGGETAEGRRLKRTARRRYTRRKNRLRYLQEIFAEEMMQVDESFFQRLDDSFLVEEDKQGSKYPIFGTLKEEKEYHKKFKTIYHLREELANSKEKADLRLVYLALAHMIKFRGHFLYEGDLKAENTDVQALFKDFVEEYDKTIEESHLSEITVDALSILTEKVSKSSRLENLIAHYPTEKKNTLFGNLIALSLGLQANFKTNFQLSEDAKLQFSKDTYEEDLEGLLGEVGDEYADLFVSAKNLYDAILLSGILTVDDNSTKAPLSASMVKRYKEHKEELAAFKRFIKEKLPKKYEEIFKDDTKNGYAGYVGADKKLRKRSGKLATEEEFYKYVKGILNKVEGADYFLDKIDREDFLRKQRTFDNGSIPHQIHLQEMHAILRRQGEHYPFLKENQDKIEKILTFRIPYYVGPLARKGSRFAWAEYKADEKITPWNFDDILDKEKSAEKFITRMTLNDLYLPEEKVLPKHSPLYETFTVYNELTKVKYVNEQGEAKFFDTNMKQEIFDHVFKENRKVTKDKLLNYLNKEFEEFRIVNLTGLDKENKAFNASLGTYHDLRKILDKSFLDDKVNEKIIEDIIQTLTLFEDREMIRQRLQKYSDIFTTQQLKELERRHYTGWGRLSYKLINGIRNKENKKTILDYLIDDGYANRNFMQLINDDALSFKEEIARAQIIGDVDDIANVVHDLPGSPAIKKGILQSVKIVDELVKVMGHNPTNIIIEMARENQTTDKGRRNSQQRLKLLQDSLKNLDNPVNIKNVENQQLQNDRLFLYYIQNGKDMYTGETLDINNLSQYDIDHIIPQAFIKDNSLDNRVLTRSDKNRGKSDDVPSIEVVHEMKSFWSKLLSVKLITQRKFDNLTKAERGGLTENDKAGFIKRQLVETRQITKHVAQVLDARFNAKHDENKKVIRDVKIITLKSNLVSQFRKDFKFYKVREINDYHHAHDAYLNAVIGTALLKKYPKLASEFVYGEFKKYDVRKFIAKSDKEIGKATAKYFFYSNLMNFFKKEVKFADGTVVERPDIETSEDGEIAWNKQTDFKIVRKVLSYPQVNIVKKTEVQTHGLDRGKPRGLFNANPSPKPKPDSSENLVGIKRNLDPKKYGGYAGISNSYAVLVKAIIEKGVKKKETMVLEFQGISILDRITFEKDKRAFLLGKGYKDIKKIIELPKYSLFELKDGSRRMLASILSTNNKRGEIHKGNELFVPQKFTTLLYHAKRINNPINKDHIEYVKKHRDDFKELLNYVLEFNEKYVGATKNGERLKEAVADFDSKSNEEICTSFLGAVNSKNAGLFELTSLGSASDFEFLGVKIPRYRDYTPSSLLKDSILIHQSITGLYETRIDLSKLGED

SEQ ID NO: 448 - protein, 1373 aa, Streptococcus bovis
  Streptococcus bovis ATCC 700338
MTKKNYSIGLDIGTNSVGWAVITDDYKVPAKKMKVLGNTDKKYIKKNLLGALLFDSGETAEATRLKRTARRRYTRRKNRLRYLQEIFAEEMTKVDESFFQRLDESFLRWDDDNKKLGRYPIFGNKADVVKYHQEFPTIYHLRKHLADSSEKADLRLVYLALAHMIKFRGHFLIEGELNAENTDVQKIFADFVGVYDRTFDDSHLSEITVDAASILTEKISKSRRLENLIKYYPTEKKNTLFGNLIALALGLQPNFKMNFKLSEDAKLQFSKDSYEEDLGELLGKIGDDYADLFTSAKNLYDAILLSGILIVDDNSTKAPLSASMIKRYVEHQEDLEKLKEFIKANKSELYHDIFKDKNKNGYAGYIENGVKQDEFYKYLKNTLSKIAGSDYFLDKIEREDFLRKQRTFDNGSIPHQIHLQEMHAILRRQGDYYPFLKENQDRIEKILTFRIPYYVGPLARKDSRFSWAEYHSDEKITPWNFDKVIDKEKSAEKFITRMTLNDLYLPEEKVLPKHSHVYETYAVYNELTKIKYVNEQGKDSFFDSNMKQEIFDHVFKENRKVTKEKLLNYLNKEFPEYRIKDLIGLDKENKSFNASLGTYHDLKKILDKAFLDDKVNEEVIEDIIKTLTLFEDKDMIHERLQKYSDIFTADQLKKLERRHYTGWGRLSYKLINGIRNKENNKTILDYLIDDGSANRNFMQLINDDTLPFKQIIQKSQVVGDVDDIEAVVHDLPGSPAIKKGILQSVKIVDELVKVMGDNPDNIVIEMARENQTTNRGRSQSQQRLKKLQNSLKELGSNILNEEKPSYIEDKVENSHLQNDQLFLYYIQNGKDMYTGDELDIDHLSDYDIDHIIPQAFIKDDSIDNRVLTSSAKNRGKSDDVPSLDIVRARKAEWVRLYKSGLISKRKFDNLTKAERGGLTEADKAGFIKRQLVETRQITKHVAQILDARFNTESDENDKVIRDVKVITLKSNLVSQFRKDFEFYKVREINDYHHAHDAYLNAVVGTALLKKYPKLASEFVYGEYKKYDIRKFITNSSDKATAKYFFYSNLMNFFKRVIRYSNGKVIVRPVVEYSKDTEDIAWDKKSNFRTICKVLSYPQVNIVKKVETQTGGFSKESILPKGDSDKLIPRKTKKAYWDTKKYGGFDSPTVAYSVFVVADVEKGKAKKLKTVKELVGISIMERSFFEENPVEFLENKGYHNIREDKLIKLPKYSLFEFEGGKRRLLASASELQKGNEMVIPGHLVKLLYHAQRINSFNSTKYLDYVSAHKKEFEKVLSCVEDFANLYVDVEKNLSKIRAVADSMDNFSIEEISNSFINLLTLTALGAPADFNFLGEKIPRKRYTSTKECLNATLIHQSITGLYETRIDLSKIGEE

SEQ ID NO: 449 - protein, 1375 aa, Streptococcus canis
  Streptococcus canis FSL Z3-227
MEKKYSIGLDIGTNSVGWAVITDDYKVPSKKFKVLGNTNRKSIKKNLMGALLFDSGETAEATRLKRTARRRYTRRKNRIRYLQEIFANEMAKLDDSFFQRLEESFLVEEDKKNERHPIFGNLADEVAYHRNYPTIYHLRKKLADSPEKADLRLIYLALAHIIKFRGHFLIEGKLNAENSDVAKLFYQLIQTYNQLFEESPLDEIEVDAKGILSARLSKSKRLEKLIAVFPNEKKNGLFGNIIALALGLTPNFKSNFDLTEDAKLQLSKDTYDDDLDELLGQIGDQYADLFSAAKNLSDAILLSDILRSNSEVTKAPLSASMVKRYDEHHQDLALLKTLVRQQFPEKYAEIFKDDTKNGYAGYVGIGIKHRKRTTKLATQEEFYKFIKPILEKMDGAEELLAKLNRDDLLRKQRTFDNGSIPHQIHLKELHAILRRQEEFYPFLKENREKIEKILTFRIPYYVGPLARGNSRFAWLTRKSEEAITPWNFEEVVDKGASAQSFIERMTNFDEQLPNKKVLPKHSLLYEYFTVYNELTKVKYVTERMRKPEFLSGEQKKAIVDLLFKTNRKVTVKQLKEDYFKKIECFDSVEIIGVEDRFNASLGTYHDLLKIIKDKDFLDNEENEDILEDIVLTLTLFEDREMIEERLKTYAHLFDDKVMKQLKRRHYTGWGRLSRKMINGIRDKQSGKTILDFLKSDGFSNRNFMQLIHDDSLTFKEEIEKAQVSGQGDSLHEQIADLAGSPAIKKGILQTVKIVDELVKVMGHKPENIVIEMARENQTTTKGLQQSRERKKRIEEGIKELESQILKENPVENTQLQNEKLYLYYLQNGRDMYVDQELDINRLSDYDVDHIVPQSFIKDDSIDNKVLTRSVENRGKSDNVPSEEVVKKMKNYWRQLLNAKLITQRKFDNLTKAERGGLSEADKAGFIKRQLVETRQITKHVARILDSRMNTKRDKNDKPIREVKVITLKSKLVSDFRKDFQLYKVRDINNYHHAHDAYLNAVVGTALIKKYPKLESEFVYGDYKVYDVRKMIAKSEQEIGKATAKRFFYSNIMNFFKTEVKLANGEIRKRPLIETNGETGEVVWNKEKDFATVRKVLAMPQVNIVKKTEVQTGGFSKESILSKRESAKLIPRKKGWDTRKYGGFGSPTVAYSILVVAKVEKGKAKKLKSVKVLVGITIMEKGSYEKDPIGFLEAKGYKDIKKELIFKLPKYSLFELENGRRRMLASATELQKANELVLPQHLVRLLYYTQNISATTGSNNLGYIEQHREEFKEIFEKIIDFSEKYILKNKVNSNLKSSFDEQFAVSDSILLSNSFVSLLKYTSFGASGGFTFLDLDVKQGRLRYQTVTEVLDATLIYQSITGLYETRTDLSQLGGD

SEQ ID NO: 450 - protein, 1345 aa, Streptococcus constellatus
  Streptococcus constellatus subsp. constellatus SK53
MGKPYSIGLDIGTNSVGWAVVTDDYKVPAKKMKVLGNTDKQSIKKNLLGALLFDSGETAEATRLKRTARRRYTRRKNRLRYLQEIFTGEMNKVDENFFQRLDDSFLVDEDKRGEHHPIFGNIAAEVKYHDDFPTIYHLRRHLADTSKKADLRLVYLALAHMIKFRGHFLYEGDLKAENTDVQALFKDFVEEYDKTIEESHLSEITVDALSILTEKVSKSSRLENLIAHYPTEKKNTLFGNLIALSLDLHPNFKTNFQLSEDAKLQFSKDTYEEDLEGFLGEVGDEYADLFASAKNLYDAILLSGILTVDDNSTKAPLSASMVKRYEEHQKDLKKLKDFIKVNAPDQYNAIFKDKNKKGYASYIESGVKQDEFYKYLKGILLKINGSGDFLDKIDREDFLRKQRTFDNGSIPHQIHLQEMHAILRRQGEHYPFLKENQDKIEKILTFRIPYYVGPLARKGSRFAWAEYKADEKITPWNFDDILDKEKSAEKFITRMTLNDLYLPEEKVLPKHSPLYEAFTVYNELTKVKYVNEQGEAKFFDTNMKQEIFDHVFKENRKVTKDKLLNYLNKEFEEFRIVNLTGLDKENKAFNSSLGTYHDLRKILDKSFLDDKANEKTIEDIIQTLTLFEDREMIRQRLQKYSDIFTKAQLKKLERRHYTGWGRLSYKLINGIRNKENKKTILDYLIDDGYANRNFMQLINDDALSFKEEIARAQIIDDVDDIANVVHDLPGSPAIKKGILQSVKIVDELVKVMGHNPANIIIEMARENQTTDKGRRNSQQRLKLLQDSLKNLDNPVNIKNVENQQLQNDRLFLYYIQNGKDMYTGETLDINNLSQYDIDHIIPQAFIKDNSLDNRVLTRSDKNRGKSDDVPSIEVVHEMKSFWSKLLSVKLITQRKFDNLTKAERGGLTEEDKAGFIKRQLVETRQITKHVAQILDERFNTEFDGNKRRIRNVKIITLKSNLVSNFRKEFELYKVREINDYHHAHDAYLNAVVGNALLLKYPQLEPEFVYGEYPKYNSYRSRKSATEKFLFYSNILRFFKKEDIQTNEDGEIAWNKEKHIKILRKVLSYPQVNIVKKTEEQTGGFSKESILPKGESDKLIPRKTKNSYWDPKKYGGFDSPVVAYSILVFADVEKGKSKKLRKVQDMVGITIMEKKRFEKNPVDFLEQRGYRNVRLEKIIKLPKYSLFELENKRRRLLASAKELQKGNELVIPQRFTTLLYHSYRIEKDYEPEHREYVEKHKDEFKELLEYISVFSRKYVLADNNLTKIEMLFSKNKDAEVSSLAKSFISLLTFTAFGAPAAFNFFGENIDRKRYTSVTECLNATLIHQSITGLYETRIDLSKLGED

SEQ ID NO: 451 - protein, 1371 aa, Streptococcus dysgalactiae
MDKKYSIGLDIGTNSVGWAVITDDYKVPSKKFKVLGNTDRHSIKKNLIGALLFDSGETAEATRLKRTARRRYTRRKNRIRYLQEIFSSEMSKVDDSFFHRLEESFLVEEDKKHERHPIFGNIVDEVAYHEKYPTIYHLRKKLADSTDKADLRLIYLALAHMIKFRGHFLIEGDLNPDNSDMDKLFIQLVQTYNQLFEENPINASRVDAKAILSARLSKSRRLENLIAQLPGEKRNGLFGNLIALSLGLTPNFKSNFDLAEDAKLQLSKDTYDDDLDNLLAQIGDQYADLFLAAKNLSDAILLSDILRVNSEITKAPLSASMIKRYDEHHQDLTLLKALVRQQLPEKYKEIFFDQSKNGYAGYIDGGASQEEFYKFIKPILEKMDGTEELLAKLNREDLLRKQRTFDNGSIPHQIHLGELHAILRRQEDFYPFLKDNREKIEKILTFRIPYYVGPLARGNSRFAWMTRKSEETITPWNFEEVVDKGASAQSFIERMTNFDKNLPNEKVLPKHSLLYEYFTVYNELTKVKYVTEGMRKPEFLSGKQKEAIVDLLFKTNRKVTVKQLKEDYFKKIECFDSVEISGVEDRFNASLGTYHDLLKIIKDKDFLDNEENEDILEDIVLTLTLFEDKEMIEERLKKYANLFDDKVMKQLKRRHYTGWGRLSRKLINGIRDKQSGKTILDFLKSDGFANRNFMQLINDDSLTFKEAIQKAQVSGQGHSLHEQIANLAGSPAIKKGILQSVKVVDELVKVMGHKPENIVIEMARENQTTQKGQKNSRERMKRIEEGIKELGSQILKEHPVENTQLQNEKLYLYYLQNGRDMYVDQELDINRLSDYDVDHIVPQSFIKDDSIDNKVLTRSDKNRGKSDNVPSEEVVKKMKNYWRQLLNAKLITQRKFDNLTKAERGGLSELDKAGFIKRQLVETRQITKHVAQILDSRMNTKYDENDKLIREVKVITLKSKLVSDFRKDFQFYKVREINNYHHAHDAYLNAVVGTALIKKYPKLESEFVYGDYKVYDVRKMIAKSEQEIGKATAKRFFYSNIMNFFKTEITLANGEIRKRPLIETNEETGEIVWDKGRDFATVRKVLSMPQVNIVKKTEVQTGALTNESIYARGSFDKLISRKHRFESSKYGGFGSPTVTYSVLVVAKSKVQDGKVKKIKTGKELIGITLLDKLVFEKNPLKFIEDKGYGNVQIDKCIKLPKYSLFEFENGTRRMLASVMANNNSRGDLQKANEMFLPAKLVTLLYHAHKIESSKELEHEAYILDHYNDLYQLLSYIERFASLYVDVEKNISKVKELFSNIESYSISEICSSVINLLTLTASGAPADFKFLGTTIPRKRYGSPQSILSSTLIHQSITGLYETRIDLSQLGGD

SEQ ID NO: 452 - protein, 1371 aa, Streptococcus dysgalactiae
MDKKYSIGLDIGTNSVGWAVITDDYKVPSKKFKVLGNTDRHSIKKNLIGALLFDSGETAEATRLKRTARRRYTRRKNRIRYLQEIFSSEMSKVDDSFFHRLEESFLVEEDKKHERHPIFGNIVDEVAYHEKYPTIYHLRKKLADSTDKADLRLIYLALAHMIKFRGHFLIEGDLNPDNSDVDKLFIQLVQTYNQLFEEKPINASGVDAKAILSARLSKSKRLENLIAQLPGEKKNGLFGNLIALSLGLTPNFKSNFDLAEDAKLQLSKDTYDDDLDNLLAQIGNQYADLFLAAKNLSDAILLSDILRVNSEITKAPLSASMIKRYDEHHQDLTLLKALVRQQLPEKYKEIFFDQSKNGYAGYIDGGASQEEFYKFIKPILEKMDGTEELLAKLNREDLLRKQRTFDNGSIPHQIHLGELHAILRRQEDFYPFLKDNREKIEKILTFRIPYYVGPLARGNSRFAWMTRKSEETITPWNFEEVVDKGASAQSFIERMTNFDKNLPNEKVLPKHSLLYEYFTVYNELTKVKYVTEGMRKPEFLSGKQKEAIVDLLFKTNRKVTVKQLKEDYFKKIECFDSVEISGVEDRFNASLGTYHDLLKIIKDKDFLDNEENEDILEDIVLTLTLFEDKEMIEERLKKYANLFDDKVMKQLKRRHYTGWGRLSRKLINGIRDKQSGKTILDFLKSDGFANRNFMQLINDDSLTFKEAIQKAQVSGQGHSLHEQIANLAGSPAIKKGILQSVKVVDELVKVMGHKPENIVIEMARENQTTQKGQKNSRERMKRIEEGIKELGSQILKEHPVENTQLQNEKLYLYYLQNGRDMYVDQELDINRLSDYDVDHIVPQSFIKDDSIDNKVLTRSDKNRGKSDNVPSEEVVKKMKNYWRQLLNAKLITQRKFDNLTKAERGGLSELDKAGFIKRQLVETRQITKHVAQILDSRMNTKYDENDKLIREVKVITLKSKLVSDFRKDFQFYKVREINNYHHAHDAYLNAVVGTALIKKYPKLESEFVYGDYKVYDVRKMIAKSEQEIGKATAKRFFYSNIMNFFKTEITLANGEIRKRPLIETNEETGEIVWDKGRDFATVRKVLSMPQVNIVKKTEVQTGALTNESIYARGSFDKLISRKHRFESSKYGGFGSPTVTYSVLVVAKSKVQDGKVKKIKTGKELIGITLLDKLVFEKNPLKFIEDKGYGNVQIDKCIKLPKYSLFEFENGTRRMLASVMANNNSRGDLQKANEMFLPAKLVTLLYHAHKIESSKELEHEAYILDHYNDLYQLLSYIERFASLYVDVEKNISKVKELFSNIESYSISEICSSVINLLTLTASGAPADFKFLGTTIPRKRYGSPQSILSSTLIHQSITGLYETRIDLSQLGGD

SEQ ID NO: 453 - protein, 1371 aa, Streptococcus dysgalactiae
MDKKYSIGLDIGTNSVGWAVITDDYKVPSKKFKVLGNTDRHSIKKNLIGALLFDSGETAEATRLKRTARRRYTRRKNRIRYLQEIFSSEMSKVDDSFFHRLEESFLVEEDKKHERHPIFGNIVDEVAYHEKYPTIYHLRKKLADSTDKADLRLIYLALAHMIKFRGHFLIEGDLNPDNSDMDKLFIQLVQTYNQLFEENPINASRVDAKAILSARLSKSRRLENLIAQLPGEKRNGLFGNLIALSLGLTPNFKSNFDLAEDAKLQLSKDTYDDDLDNLLAQIGDQYADLFLAAKNLSDAILLSDILRVNSEITKAPLSASMIKRYDEHHQDLTLLKALVRQQLPEKYKEIFFDQSKNGYAGYIDGGASQEEFYKFIKPILEKMDGTEELLAKLNREDLLRKQRTFDNGSIPHQIHLGELHAILRRQEDFYPFLKDNREKIEKILTFRIPYYVGPLARGNSRFAWMTRKSEETITPWNFEEVVDKGASAQSFIERMTNFDKNLPNEKVLPKHSLLYEYFTVYNELTKVKYVTEGMRKPEFLSGKQKEAIVDLLFKTNRKVTVKQLKEDYFKKIECFDSVEISGVEDRFNASLGTYHDLLKIIKDKDFLDNEENEDILEDIVLTLTLFEDKEMIEERLKKYANLFDDKVMKQLKRRHYTGWGRLSRKLINGIRDKQSGKTILDFLKSDGFANRNFMQLINDDSLTFKEAIQKAQVSGQGHSLHEQIANLAGSPAIKKGILQSVKVVDELVKVMGHKPENIVIEMARENQTTQKGQKNSRERMKRIEEGIKELGSQILKEHPVENTQLQNEKLYLYYLQNGRDMYVDQELDINRLSDYDVDHIVPQSFIKDDSIDNKILTRSDKNRGKSDNVPSEEVVKKMKNYWRQLLNAKLITQRKFDNLTKAERGGLSELDKAGFIKRQLVETRQITKHVAQILDSRMNTKYDENDKLIREVKVITLKSKLVSDFRKDFQFYKVREINNYHHAHDAYLNAVVGTALIKKYTKLESEFVYGDYKVYDVRKMIAKSEQEIGKATAKRFFYSNIMNFFKTEITLANGEIRKRPLIETNEETGEIVWDKGRDFATVRKVLSMPQVNIVKKTEVQTGALTNESIYARGSFDKLISRKHRFESSKYGGFGSPTVTYSVLVVAKSKVQDGKVKKIKTGKELIGMTLLDKLVFEKNPLKFIEDKGYGNVQIDKCIKLPKYSLFEFENGTRRMLASVMANNNSRGDLQKANEMFLPAKLVTLLYHAHKIESSKELEHEAYILDHYNDLYQLLSYIERFASLYVDVEKNISKVKELFSNIESYSISEICSSVINLLTLTASGAPADFKFLGTTIPRKRYGSPQSILSSTLIHQSITGLYETRIDLSQLGGD

SEQ ID NO: 454 - protein, 1371 aa, Streptococcus dysgalactiae
MDKKYSIGLDIGTNSVGWAVITDDYKVPSKKFKVLGNTDRHSIKKNLIGALLFDSGETAEATRLKRTARRRYTRRKNRIRYLQEIFSSEMSKVDDSFFHRLEESFLVEEDKKHERHPIFGNIVDEVAYHEKYPTIYHLRKKLADSTDKADLRLIYLALAHMIKFRGHFLIEGDLNPDNSDMDKLFIQLVQTYNQLFEENPINASRVDAKAILSARLSKSRRLENLIAQLPGEKRNGLFGNLIALSLGLTPNFKSNFDLAEDAKLQLSKDTYDDDLDNLLAQIGDQYADLFLAAKNLSDAILLSDILRVNSEITKAPLSASMIKRYDEHHQDLTLLKALVRQQLPEKYKEIFFDQSKNGYAGYIDGGASQEEFYKFIKPILEKMDGTEELLAKLNREDLLRKQRTFDNGSIPHQIHLGELHAILRRQEDFYPFLKDNREKIEKILTFRIPYYVGPLARGNSRFAWMTRKSEETITPWNFEEVVDKGASAQSFIERMTNFDKNLPNEKVLPKHSLLYEYFTVYNELTKVKYVTEGMRKPEFLSGKQKEAIVDLLFKTNRKVTVKQLKEDYFKKIECFDSVEISGVEDRFNASLGTYHDLLKIIKDKDFLDNEENEDILEDIVLTLTLFEDKEMIEERLKTYAHLFDDKVMKQLKRRHYTGWGRLSRKLINGIRDKQSGKTILDFLKSDGFANRNFIQLIHDDSLTFKEAIQKAQVSGQGHSLHEQIANLAGSPAIKKGILQSVKVVDELVKVMGHKPENIVIEMARENQTTQKGQKNSRERMKRIEEGIKELGSQILKEHPVENTQLQNEKLYLYYLQNGRDMYVDQELDINRLSDYDVDHIVPQSFIKDDSIDNKVLTRSDKNRGKSDDVPSEEVVKKMKNYWRQLLNAKLITQRKFDNLTKAERGGLSELDKAGFIKRQLVETRQITKHVAQILDSRMNTKYDENDKLIREVKVITLKSKLVSDFRKDFQFYKVREINNYHHAHDAYLNAVVGTALIKKYPKLESEFVYGDYKVYDVRKMIAKSEQEIGKATAKRFFYSNIMNFFKTEITLANGEIRKRPLIETNEETGEIVWNKGRDFATVRKVLSMPQVNIVKKTEVQTGALTNESIYARGSFDKLISRKHRFESSKYGGFGSPTVTYSVLVVAKSKVQDGKVKKIKTGKELIGITLLDKLVFEKNPLKFIEDKGYGNVQIDKCIKLPKYSLFEFENGTRRMLASVMANNNSRGDLQKANEMFLPAKLVTLLYHAHKIESSKELEHEAYILDHYNDLYQLLSYIERFASLYVDVEKNISKVKELFSNIESYSISEICSSVINLLTLTASGAPADFKFLGTTIPRKRYGSPQSILSSTLIHQSITGLYETRIDLSQLGGD

SEQ ID NO: 455 - protein, 1348 aa, Streptococcus equi
MKKPYTIALDIGTNSVGWVVVTDDYRVPTKKMKVLGNTERKTIKKNLIGALLFDSGDTAEGTRLKRTARRRYTRRKNRLRYLKEIFTEEMAKVDDGFFQRLEDSFYVLEDKEGNKHPIFANLADEVAYHKKYPTIYHLRKELVDNPQKADLRLIYLAVAHIIKFRGHFLIEGTLSSKNNNLQKSFDHLVDTYNLLFEEQRLLTEGINAKELLSAALSKSKRLENLISLIPGQKKTGIFGNIIALSLGLTPNFKANFGLSKDVKLQLAKDTYADDLDSLLAQIGDQYADLFLAAKNLSDAILLSDILTESDEITRAPLSASMVKRYREHHKDLVTLKTLIKDQLPEKYQEIFLDKTKNGYAGYIEGQVSQEEFYKYLKPILARLDGSEPLLLKIDREDFLRKQRTFDNGSIPHQIHLEELHAILRRQEVFYPFLKDNRKKIESLLTFRIPYYVGPLARGHSRFAWVKRKFDGAIRPWNFEEIVDEEASAQIFIEKMTKNDLYLPNEKVLPKHSLLYETFTVYNELTKVKYATEGMTRPQFLSADQKQAIVDLLFKTNRKVTVKQLKENYFKKIECWDSVEITGVEDSFNASLGTYHDLLKIIQDKDFLDNPDNQKIIEDIILTLTLFEDKKMISKRLDQYAHLFDKVVLNKLERHHYTGWGRLSGKLINGIRDKQSGKTILDFLKADGFANRNFMQLIHDSELSFIDEIAKAQVIGKTEYSKDLVGNLAGSPAIKKGISQTIKIVDELVKIMGYLPQQIVIEMARENQTTAQGIKNARQRMRKLEETAKKLGSNILKEHPVDNSQLQNDKRYLYYLQNGKDMYTGDDLDIDYLSSYDIDHIIPQSFIKNNSIDNKVLTSQGANRGKLDNVPSEAIVRKMKGYWQSLLRAGAISKQKFDNLTKAERGGLTQVDKAGFIQRQLVETRQITKHVAQILDSRFNTEFDDHNKRIRKVHIITLKSKLVSDFRKEFGLYKIRDINHYHHAHDAYLNAVVAKAILGKYPQLAPEFVYGDYPKYNSFKERQKATQKMLFYSNILKFFKDQESLHVNSDGEEIWNANKHLPIIKNVLSIPQVNIVKKTEVQTGGFYKESILSKGNSDKLIPRKNNWDTRKYGGFDSPTVAYSVLVIAKMEKGKAKVLKPVKEMVGITIMERTAFEENPVVFLEARGYREIQEHLIIKLPKYSLFELENGRRRLLASASELQKGNELFLPVDYMTFLYLAAHYHELTGSSEDVLRKKYFVDRHLHYFDDIIQMINDFAERHILASSNLEKINHTYHNNSDLPVNERAENIINVFTFVALGAPAAFKFFDATIDRKRYTSTKEVLNATLIHQSVTGLYETRIDLSQLGEN

SEQ ID NO: 456 - protein, 1377 aa, Streptococcus equinus
  Streptococcus equinus ATCC 9812
MEKTYSIGLDIGTNSVGWAVITDDYKVPAKKMKVLGNTDKKYIKKNLLGALLFDSGETAEATRLKRAARRRYTRRKNRLRYLQEIFAKEMAKVDESFFQRLEESFLTDDDKTFDSHPIFGNKAEEDTYHQEFPTIYHLRKHLADSPEKVDLRLVYLALAHMIKFRGHFLIEGQLNAENTDVQKIFADFVGVYDRTFDDSHLSEITVDAASILTEKISKSRRLENLIKQYPTEKKNTLFGNLVALALGLQPNFKTNFKLSEDAKLQFSKDTYDEDLEELLGKIGDDYADLFTAAKNLYDAILLSGILTVDDNSTKAPLSASMIKRYEEHHEDLEKLKTFIKVNNFDKYHEIFKDKSKNGYAGYIENGVKQDIFYKHLKSIISEKNGGQYFLDKIEREDFLRKQRTFDNGSIPYQIHLQEMRTILRRQGEYYPFLKENQAKIEKILTFRIPYYVGPLARKNSRFAWAKYHSDEPITPWNFDEVVDKEKSAEKFITRMTLNDLYLPEEKVLPKHSYVYETFAVYNELTKIKYVNEQGKSFFFDANMKQEIFDHVFKENRKVTKAKLLSYLNNEFEEFRINDLIGLDKDSKSFNASLGTYHDLKKILDKSFLDDKTNEQIIEDIVLTLTLFEDRDMIHERLQKYSDIFTSQQLKKLERRHYTGWGRLSYKLINGIRNKENNKTILDFLIDDGDANRNFMQLINDDSLSFKTTIQEAQVVGDVDDIEAVVHDLPGSPAIKKGILQSVKIVDELVKVMGHNPQNIVIEMARENQITGYGRNRSNQRLKRLQDSLKEFGSDILSKKKPSYVDSKVENSHLQNDRLFLYYIQNGKDMYTGEELDIDHLSDYDIDHIIPQAFIKDNSIDNRVLTSSAKNRGKSDDVPSIEIVRNRKSYWYKLYKSGLISKRKFDNLTKAERGGLTETDKAGFIKRQLVETRQITKHVAQILDARFNTKCDENDKVIRDVKVITLKSSLVSQFRKEFKFYKVREINDYHHAHDAYLNAVVGTALLKKYPKLAPEFVYGEYKKYDVRKLVAKSSDNHSELGKATAKYFFYSNLMNFFKTEVKYADGRVFERPDIETNADGEVVWNKQRDFNIVRKVLSYPQVNIVKKVEVQTGGFSKESILPKGDSDKLIPRKTKKLQWETQKYGGFDSPTVAYSVLVVADVEKGKTRKLKTVKELVGISIMERSSFEENPVSFLEKKGYHNVQEDKLIKLPKYSLFEFEGGRRRLLASATELQKGNEVVLPQYMVNLLYHSQHVNNSHKPEHLNYVKQHKDEFKDIFNLIISIARINILKPKVVDNLINEFTEYGQEDISSLSESFINLLKFISFGAPGAFKFLKLDVKQSNLRYKSTTEALSATLIHQSVTGLYETRIDLSKLGEE

SEQ ID NO: 457 - protein, 1370 aa, Streptococcus gallolyticus
MTKKNYSIGLDIGTNSVGWAVITDDYKVPAKKMKVLGNTDKKYIKKNLLGALLFDSGETAEATRLKRTARRRYTRRKNRLRYLQEIFAEEMTKVDESFFYRLDESFLTTDEKDFERHPIFGNKAEEDAYHQKFPTIYHLRNYLADSSEKADLRLVYLALAHMIKYRGHFLIEGKLNAENTDVQKLFTDFVGVYDRTFDDSHLSEITVDVASTLTEKISKSRRLENLIKYYPTEKKNTLFGNLIALALGLQPNFKMNFKLSEDAKLQFSKDTYEEDLEELLGKIGDDYADLFTSAKNLYDAILLSGILTVDDNSTKAPLSASMIKRYVEHHEDLEKLKEFIKANKSELYHDIFKDKNKNGYAGYIENGVKQDEFYKYLKNTLSKIDGSDYFLDKIEREDFLRKQRTFDNGSIPHQIHLQEMHAILRRQGDYYPFLKEKQDRIEKILTFRIPYYVGPLVRKDSRFAWAEYRSDEKITPWNFDKVIDKEKSAEKFITRMTLNDLYLPEEKVLPKHSHVYETYAVYNELTKIKYVNEQGKESFFDSNMKQEIFDHVFKENRKVTKEKLLNYLNKEFPEYRIKDLIGLDKENKSFNASLGTYHDLKKILDKAFLDDKVNEEVIEDIIKTLTLFEDKDMIHERLQKYSDIFTANQLKKLERRHYTGWGRLSYKLINGIRNKENNKTILDYLIDDGSANRNFMQLINDDTLPFKQIIQKSQVVGDVDDIEAVVHDLPGSPAIKKGILQSVKIVDELVKVMGDNPDNIVIEMARENQTTNRGRSQSQQRLKKLQSSLKELGSNILNEEKPSYIEDKVENSHLQNDQLFLYYIQNGKDMYTGDELDIDHLSDYDIDHIIPQAFIKDDSIDNRVLTSSAKNRGKSDDVPSLDIVRARKAEWVRLYKSGLISKRKFDNLTKAERGGLTEADKAGFIKRQLVETRQITKHVAQILDARFNTEHDENDKVIRDVKVITLKSNLVSQFRKDFEFYKVREINDYHHAHDAYLNAVVGTALLKKYPKLASEFVYGEYKKYDIRKFITNSSDKATAKYFFYSNLMNFFKTKVKYADGTVFERPIIETNADGEIAWNKQIDFEKVRKVLSYPQVNIVKKVETQTGGFSKESILPKGDSDKLIPRKTKKVYWDTKKYGGFDSPTVAYSVFVVADVEKGKAKKLKTVKELVGISIMERSFFEENPVEFLENKGYHNIREDKLIKLPKYSLFEFEGGRRRLLASASELQKGNEMVLPGYLVELLYHAHRADNFNSTEYLNYVSEHKKEFEKVLSCVEDFANLYVDVEKNLSKIRAVADSMDNFSIEEISNSFINLLTLTALGAPADFNFLGEKIPRKRYTSTKECLTATLIHQSITGLYETRIDLSKLGEE

SEQ ID NO: 458 - protein, 1370 aa, Streptococcus gallolyticus; identical to SEQ ID NO: 457
  Streptococcus gallolyticus subsp. gallolyticus TX20005

SEQ ID NO: 459 - protein, 1371 aa, Streptococcus gallolyticus
MTEKNYSIGLDIGTNSVGWAVITDDYKVPAKKMKVLGNTDKKYIKKNLLGALLFDNGETAEATRLKRTARRRYTRRKNRLRYLQEIFAEEMAKVDESFFYRLDESFLTTDDKDFERHPIFGNKADEIKYHQEFPTIYHLRKHLADSHEKADLRLIYLALAHMIKFRGHFLIEGELNAENTDVQKLFEAFVEVYDRTFDDSNLSEITVDASSILTEKFSKSRRLENLIKHYPTEKKNTLFGNLVALALGLQPNFKTSFKLSEDAKLQFSKDTYEEDLEELIGKIGDEYADLFTSAKNLYDAILLSGILTVADNTTKAPLSASMIKRYNEHQVDLKKLKEFIKNNASDKYDEIFNDKDKNGYAGYIENGVKQDEFYKYLKTTLSKIDGSDYFLDKIEREDFLRKQRTFDNGSIPHQIHLQEMHAILRRQGEHYAFLKENQAKIEKILTFRIPYYVGPLARKNSRFAWAEYHSDEKITPWNFDEIIDKEKSAEKFITRMTLNDLYLPEEKVLPKHSLVYETYTVYNELTKVKYVNEQGKSNFFDANMKQEIFEHVFKENRKVTKDKFLNYLNKEFPEYRIQDLIGLDKENKSFNASLGTYHDLKKILDKSFLDDKTNETIIEDIIQTLTLFEDRDMIRQRLQKYSDIFTPQQLKKLERRHYTGWGRLSYKLINGIRNKENGKSILDYLIDDGYANRNFMQLISDDTLPFKQIIKDAQIIGDIDDVTSVVRELPGSPAIKKGILQSVKIVDELVKVMGHNPDNIVIEMARENQTTNRGRNQSQQRLKKLQDSLKELGSNILNEEKPSYIEGKVENNHLQDDRLFLYYIQNGKDMYTGDELDIDHLSDYDIDHIIPQAFIKDDSIDNRVLTSSAKNRGKSDDVPSLDIVHDRKADWIRLYKSGLISKRKFDNLTKAERGGLTENDKAGFIKRQLVETRQITKHVAQILDSRFNTERDENDKVIRNVKVITLKSNLVSQFRKDFKFYKVREINDYHHAHDAYLNAVVGTALLKKYPKLAPEFVYGEYKKYDIRKFITSSGDKATAKYFFYSNLMNFFKRVIRYSNGKVVVRPVIECSKDTGEIAWNKQTDFEKVRRVLSYPQVNIVKKVETQTGGFSKESILPKGNSDKLIPRKTKKFRWDTPKYGGFDSPNIAYSVFVIADVEKGKAKKLKTVKELVGISIMERSSFEENPVVFLEKKGYQNVQEDNLIKLPKYSLFEFEGGRRRLLASASELQKGNEVVLSRHLVELLYHAHRVNSFNNSEHLKYVSEHKKEFGEVLSCVENFAKSYVDVEKNLGKIRAVADKIDTFSIEDISISFVNLLTLTALGAPADFNFLGEKIPRKRYTSTKECLNATLIHQSITGLYETRIDLSKLGEE

SEQ ID NO: 460 - protein, 1130 aa, Streptococcus gallolyticus
MTNGKILGLDIGIASVGVGIIEAKTGKVVHANSRLFSAANAENNAERRGFRGSRRLNRRKKHRVKRVRDLFEKYEIVTDFRNLNLNPYELRVKGLTEQLTNEELFAALRTISKRRGISYLDDAEDDSTGSTDYAKSIDENRRLLKTKTPGQIQLERLEKYGQLRGNFTVYDENGEAHRLINVFSTSDYEKEARKILETQADYNKKITAEFIDDYVEILTQKRKYYHGPGNEKSRTDYGRFRTDGTTLENIFGILIGKCSFYPDEYRASKASYTAQEYNFLNDLNNLKVPTETGKLSTEQKEALVEFAKSTATLGPAKLLKEIAKILDCKVDEIKGYREDDKGKPDLHTFEPYRKLKFNLDSVNIDDLSREVLDKLADILTLNTEREGIEDAIRHNLPNQFTEGQISEIIKVRKSQSTAFNKGWHSFSAKLMNELIPELYATSDEQMTILTRLEKFKVNKKSSKNTKTIDEKEVTDEIYNPVVAKSVRQTIKIINAAVKKYGDFDKIVIEMPRDKNADDEKKFIDKRNKENKKEKDDALKRAAYLYNGTDKLPDEVFHGNKQLETKIRLWYQQGERCLYSGKPIPIQELVHNSNNFEIDHILPLSLSFDDSLANKVLVYAWTNQEKGQKTPYQVIDSMDAAWSFREMKDYVLKQKGLGKKKRDYLLTTENIDKIEVKKKFIERNLVDTRYASRVVLNSLQSALRELGKDTKISVIRGQFTSQLRRKWKIDKSRETYHHHAVDALIIAASSQLKLWEKQDNPMFVDYGNNQVVDKQTGEILSVSDDEYKELVFQPPYQGFVNMISSKGFEDEILFSYQVDSKYNRKVSDATIYSTRKAKIGKDKKEETYVLGKIKDIYSQNGFDTFIKKYNKDKTQFLMYQKDPLTWENVIEVILRDYPTTKKSEDGKNDVKCNPFEEYRRENGLVCKYSKKGKGTPIKSLKYYDKKLGNCIDITPEGSKNEVVLQSLNPWRADVYFNPETLKYELLGLKYSDLSFEKGTGKYHISQEKYDVIKEKEGIGKKSEFKFTLYRNDLILIKDTASGEQEIYRFLSRTMPNVKHYAELKPYDKEKFDNVQELVEALGEADKVGRCIKGLNKSNLSIYKVRTDVLGNKYFVKKEGDKPKLDFKNNKK

SEQ ID NO: 461 - protein, 1136 aa, Streptococcus gordonii
MNGLVLGLDIGIASVGVGILEKDTGKIIHASSRLFPAATADNNVERRSNRQGRRLNRRKKHRSVRLQDLFEGYGLLTDFSKVSMNLNPYQLRVQGMENQLTNEELFVALKNIVKRRGISYLDDASEDGGTVSSDYGKAVEENRKLLAEKTPGQIQLERFEKYGQLRGDFTVEENGEKHRLINVFSTSAYRKEAERILRKQQEFNSKITDEFIEDYLIILTGKRKYYHGPGNEKSRTDYGRFRTDGTTLDNIFGILIGKCTFYTEEYRASKASYTAQEFNLLNDLNNLTVPTETKKLSEEQKKLIIEYAKSAKTLGASTLLKYIAKMIDASVDQIRGYRVDVNNKPEMHTFEVYRKMQSLETIKVEELPRKVLDELAHILTLNTEREGIEEAINSKLKDIFNRDQVLELVQFRKNNSSLFSKGWHNFSIKLMMELIPELYETSEEQMTILTRLGKQRSKETSKRTKYIDEKELTEEIYNPVVAKSVRQAIKIINEATKKYGIFDNIVIEMARENNEEDAKKDYIKRQKANQDEKNAAMEKAAFQYNGKKELPDNIFHGHKELTTKIRLWHQQGEKCLYTGKNIPISDLIHNQYKYEIDHILPLSLSFDDSLSNKVLVLATANQEKGQRTPFQALDSMDDAWSYREFKSYVKDSKLLSNKKKDYLLTEEDISKIEVKQKFIERNLVDTRYSSRVVLNALQDFYKSHQLDTTISVVRGQFTSQLRRKWGIEKSRETYHHHAVDALIIAASSQLRLWKKHSNPLIAYKEGQFVDSETGEIVSLSDEEYKELVFKAPYDHFVDTLRSKKFEDSILFSYQVDSKYNRKISDATIYATRKAKLDKEKKEYTYTLGKIKDIYALGTKTPSKTGFYKFLDLYKTDKSQFLMYQKDRKTWDEVIEKIIEQYRPFKEYDKNGKEVDFNPFEKYRIGNGPIRKYSKKGNGPEIKSLKYYDILLGKHKNITPDGSRNTVALLSLNPWRTDVYYNSETKKYEFLGLKYADLCFEEGGAYGISEVKYKKIREKEGIGKNSEFKFTLYKNDLILIKDTETNCQQFFRFWSRTGKDNPKSFEKHKIELKPYEKAKFEKGEELKVLGKVPPSSNQFQKNMQIENLSIYKVKTDILGNKHFIKKEGDEPKLKFKK

SEQ ID NO: 462 - protein, 1129 aa, Streptococcus infantarius
  Streptococcus infantarius subsp. infantarius ATCC BAA-102
MSNGKILGLDIGVASVGVGIIDSKTGNVIHANSRLFSAANAENNAERRGFRGARRLTRRKKHRVKRVRDLFEKYDISTDFRNLNLNPYELRVKGLTEQLTNEELFAALRTIAKRRGISYLDDAEDDSTGSSDYAKSIDENRRLLKTKTPGQIQLERLEKYGQLRGNFTVYDENGEAHRLINVFSTSDYKNEARKILETQSNYNKQITDEFIEDYIEILTQKRKYYHGPGNEKSRTDYGRFRTDGTTLENIFGILIGKCSFYPEEYRASKASYTAQEFNFLNDLNNLKVPTETGKLSTEQKEYLVDFAKKSKALGASKLLKEIAKIVDCSVDDIKGYRVDNKDKPDLHTFEPYRKLKFNLSSIDIDELSRETLDKLADILTLNTEREGIEDAIKRNLPSQFTEEQISEIVQIRKNQSSAFNKGWHSFSAKLMNELIPELYVTSEEQMTILTRLEKFKVNKKSSKNTKTIDEKEITDEIYNPVVAKSVRQTIKIINAAVKKYGDFDKIVIEMPRDKNAEDEKKFIDKKQKENKKEKDDSLKRAAFLYNGTDNLPDGVFHGNKELKTKIRLWYQQGERCLYSGKLISIHDLVHNSNKFEIDHILPLSLSFDDSLANKVLVYAWTNQEKGQKTPYQVIDSMDTAWSFREMKDYVLKQKGLGKKKCEYLLTTENIDKIEVKKKFIERNLVDTRYASRVVLNSLQTALKELGKDTKVSVVRGQFTSQLRRKWNIDKSRETYHHHAVDALIIAASSQLKLWQKQENPMFESYGENQVVNKETGEILSISDDKYKELVFQPPYQGFVNTISSKGFEDEILFSYQVDSKFNRKVSDATIYSTRKAKLGKDKKDETYVLGKIKDIYSQDGFDTFIKRYKKDKTQFLMYQKDPLTWENVIEVILRDYPSEKLSEDGKKTVKCNPFEEYRRENGLICKYSKKGNGTPIKSLKYYDKKLGNCIDITPEKSKNRVVLRQISPWRADIYFNLETLKYELMGLKYSDLSFEKGTGKYHISQEKYDAIREKEGIGKKSEFKFTLYRNDLILIKDTLNNCERMLRFGSKNDTSKHYVELKPLEKGTFDSEEEILPVLGKVAKSGQFIKGLNKPNISIYKVRTDVLGNKFFIKKEGDKPKLDFKNNNK

SEQ ID NO: 463 - protein, 1375 aa, Streptococcus infantarius
MEKSYSIGLDIGTNSVGWAVITDDYKVPAKKMKVLGNTDKKYIKKNLLGALLFDSGETAEVTRLKRTARRRYTRRKNRLRYLQEIFAKEMTKVDESFFQRLEESFLTDDDKTFDSHPIFGNKAEEDAYHQKFPTIYHLRKYLADSQEKADLRLVYLALAHMIKYRGHFLIEGELNAENTDVQKLFNVFVETYDKIVDESHLSEIEVDASSILTEKVSKSRRLENLIKQYPTEKKNTLFGNLIALALGLQPNFKTNFKLSEDAKLQFSKDTYEEDLEELLGKVGDDYADLFISAKNLYDAILLSGILTVDDNSTKAPLSASMIKRYVEHHEDLEKLKEFIKINKLKLYHDIFKDKTKNGYAGYIDNGVKQDEFYKYLKTILTKIDDSDYFLDKIERDDFLRKQRTFDNGSIPHQIHLQEMHSILRRQGDYYPFLKENQAKIEKILTFRIPYYVGPLARKDSRFAWANYHSDEPITPWNFDEVVDKEKSAEKFITRMTLNDLYLPEEKVLPKHSHVYETFTVYNELTKIKYVNEQGESFFFDANMKQEIFDHVFKENRKVTKAKLLSYLNNEFEEFRINDLIGLDKDSKSFNASLGTYHDLKKILDKSFLDDKTNGQIIEDIVLTLTLFEDRDMIHERLQKYSDFFTSQQLKKLERRHYTGWGRLSYKLINGIRNKENNKTILDFLIDDGHANRNFMQLINDESLSFKTIIQEAQVVGDVDDIEAVVHDLPGSPAIKKGILQSVKIVDELVKVMGDNPDNIVIEMARENQTTGYGRNKSNQRLKRLQDSLKEFGSDILSKKKPSYVDSKVENSHLQNDRLFLYYIQNGKDMYTGEELDIDRLSDYDIDHIIPQAFIKDNSIDNKVLTSSAKNRGKSDDVPSIEIVRNRRSYWYKLYKSGLISKRKFDNLTKAERGGLTEADKAGFIKRQLVETRQITKHVAQILDARFNTKRDENDKVIRDVKVITLKSNLVSQFRKEFKFYKVREINDYHHAHDAYLNAVVGTALLKKYPKLTPEFVYGEYKKYDVRKLIAKSSDDYSEMGKATAKYFFYSNLMNFFKTEVKYADGRVFERPDIETNADGEVVWNKQKDFDIVRKVLSYPQVNIVKKVEAQTGGFSKESILSKGDSDKLIPRKTKKVYWNTKKYGGFDSPTVAYSVLVVADIEKGKAKKLKTVKELVGISIMERSFFEENPVSFLEKKGYHNVQEDKLIKLPKYSLFEFEGGRRRLLASATELQKGNEVMLPAHLVELLYHAHRIDSFNSTEHLKYVSEHKKEFEKVLSCVENFSNLYVDVEKNLSKVRAAAESMTNFSLEEISASFINLLTLTALGAPADFNFLGEKIPRKRYTSTKECLSATLIHQSVTGLYETRIDLSKLGEE

SEQ ID NO: 464 - protein, 1368 aa, Streptococcus iniae
  Streptococcus iniae 9117
MRKPYSIGLDIGTNSVGWAVITDDYKVPSKKMRIQGTTDRTSIKKNLIGALLFDNGETAEATRLKRTTRRRYTRRKYRIKELQKIFSSEMNELDIAFFPRLSESFLVSDDKEFENHPIFGNLKDEITYHNDYPTIYHLRQTLADSDQKADLRLIYLALAHIIKFRGHFLIEGNLDSENTDVHVLFLNLVNIYNNLFEEDIVETASIDAEKILTSKTSKSRRLENLIAEIPNQKRNMLFGNLVSLALGLTPNFKTNFELLEDAKLQISKDSYEEDLDNLLAQIGDQYADLFIAAKKLSDAILLSDIITVKGASTKAPLSASMVQRYEEHQQDLALLKNLVKKQIPEKYKEIFDNKEKNGYAGYIDGKTSQEEFYKYIKPILLKLDGTEKLISKLEREDFLRKQRTFDNGSIPHQIHLNELKAIIRRQEKFYPFLKENQKKIEKLFTFKIPYYVGPLANGQSSFAWLKRQSNESITPWNFEEVVDQEASARAFIERMTNFDTYLPEEKVLPKHSPLYEMFMVYNELTKVKYQTEGMKRPVFLSSEDKEEIVNLLFKKERKVTVKQLKEEYFSKMKCFHTVTILGVEDRFNASLGTYHDLLKIFKDKAFLDDEANQDILEEIVWTLTLFEDQAMIERRLVKYADVFEKSVLKKLKKRHYTGWGRLSQKLINGIKDKQTGKTILGFLKDDGVANRNFMQLINDSSLDFAKIIKNEQEKTIKNESLEETIANLAGSPAIKKGILQSIKIVDEIVKIMGQNPDNIVIEMARENQSTMQGIKNSRQRLRKLEEVHKNTGSKILKEYNVSNTQLQSDRLYLYLLQDGKDMYTGKELDYDNLSQYDIDHIIPQSFIKDNSIDNTVLTTQASNRGKSDNVPNIETVNKMKSFWYKQLKSGAISQRKFDHLTKAERGALSDFDKAGFIKRQLVETRQITKHVAQILDSRFNSNLTEDSKSNRNVKIITLKSKMVSDFRKDFGFYKLREVNDYHHAQDAYLNAVVGTALLKKYPKLEAEFVYGDYKHYDLAKLMIQPDSSLGKATTRMFFYSNLMNFFKKEIKLADDTIFTRPQIEVNTETGEIVWDKVKDMQTIRKVMSYPQVNIVMKTEVQTGGFSKESIWPKGDSDKLIARKKSWDPKKYGGFDSPIIAYSVLVVAKIAKGKTQKLKTIKELVGIKIMEQDEFEKDPIAFLEKKGYQDIQTSSIIKLPKYSLFELENGRKRLLASAKELQKGNELALPNKYVKFLYLASHYTKFTGKEEDREKKRSYVESHLYYFDEIMQIIVEYSNRYILADSNLIKIQNLYKEKDNFSIEEQAINMLNLFTFTDLGAPSAFKFFNGDIDRKRYSSTNEIINSTLIYQSPTGLYETRIDLSKLGGK

SEQ ID NO: 465 - protein, 1338 aa, Streptococcus macacae
  Streptococcus macacae NCTC 11558
MTKPYSIGLDIGTNSVGWAVVTDGYKVPAKKMKVLGNTDKSHIKKNLLGALLFDSGNTAKDRRLKRTARRRYTRRRNRILYLQEIFAEEMAKADESFFQRLNESFLTNDDKEFDSHPIFGNKAEEEAHHHKFPTIFHLRKHLADSTEKSDLRLIYLALAHMIKFRGHFLIEGQLKAENTNVQTLFDDFVEVYDKTVEESHLSEISVSSILTEKISKSRRLENLIKYYPTEKKNTLFGNLIALSLGLQPNFKTNFKLSEDAKLQFSKDTYEEDLGELLGKIGDNYADLFISAKNLYDAILLSGILTIDDNTTKAPLSASMIKRYEEHQEDLAQLKKFIRQNLPDQYSEVFSDKTKDGYAGYIDGKTNQEAFYKYIKNMLSKTEGADYFLDKIDREDFLRKQRTFDNGSVPHQIHLQEMHAILRRQGEYYPFLKENQDKIEKILTFRIPYYVGPLARKGSRFAWAEYKADKKVTPWNFDDILDKEKSAEEFITRMTLNDLYLPEEKVLPKHSLVYETFNVYNELTKVKYVNEQGKAIFFDANMKQEIFDHVFKENRKVTKDKLLNYLNKEFEEFRIVNLTGLDKENKAFNSSLGTYHDLRKILDKSFLDDKVNEKIIEDIIQTLTLFEDREMIRQRLQKYSDIFTTQQLKKLERRHYTGWGRLSAKLINGIRDKQSNKTILGYLIDDGYSNRNFMQLINDDSLPFKEEIARAQVIGETDDLNQLVSDIAGSPAIKKGILQSLKIVDELVKVMGHNPANIVIEMARENQTTAKGRRSSQQRYKRLEEAIKNLDHDLNHKILKEHPTDNQALQNDRLFLYYLQNGRDMYTEDPLDINRLSDYDIDHIIPQSFIKDDSIDNKVLVSSAKNRGKSDNVPSEDVVNRMRPFWNKLLSCGLISQRKYSNLTKKELKPDDKAGFIKRQLVETRQITKHVAQILDARFNTKRDENKKVIRDVKIITLKSNLVSQFRKDFKFYKVREINDYHHAHDAYLNAVIGKALLDVYPQLEPEFVYGEYPHFHGYKENKATAKKFFYSNIMNFFKKDDIRTDENGEIVWKKDEHISNIKRVLSYPQVNIVKKVEIQTVGQNGGLFDDNPKSPLEVTPSKLVPLKKELNPKKYGGYQKPTTAYPVLLITDTKQLIPISVMNKKQFEQNPVKFLRDRGYQQVGKNDFIKLPKYTLVDIGDGIKRLWASSKEIHKGNQLVVSKKSQILLYHAHHLDSDLSNDYLQNHNQQFDVLFNEIISFSKKCKLGKEHIQKIENVYSNKKNSASIEELAESFIKLLGFTQLGATSPFNFLGVKLNQKQYKGKKDYILPCTEGTLIRQSITGLYETRVDLSKIGED

SEQ ID NO: 466 - protein, 1130 aa, Streptococcus macedonicus
MTNGKILGLDIGIASVGVGIIEAKTGKVVHANSRLFSAANAENNAERRGFRGSRRLNRRKKHRVKRVRDLFEKYGIVTDFRNLNLNPYELRVKGLTEQLTNEELFAALRTISKRRGISYLDDAEDDSTGSTDYAKSIDENRRLLKTKTPGQIQLERLEKYGQLRGNFTVYDENGEAHRLINVFSTSDYEKEARKILETQADYNKKITAEFIDDYVEILTQKRKYYHGPGNEKSRTDYGRFRTDGTTLENIFGILIGKCNFYPDEYRASKASYTAQEYNFLNDLNNLKVPTETGKLSTEQKESLVEFAKNTAILGPAKLLKEIAKILDCKVDEIKGYREDDKGKPDLHTFEPYRKLKFNLDSVNIDYLSREVLDKLADILTLNTEREGIEDAIKRNLPNQFTEEQISEIINVRKSQSTAFNKGWHSFSAKLMNELIPELYATSDEQMTILTRLEKFKVKKKSSKNIKTIDEKEITDEIYNPVVAKSVRQTIKIINAAVKKYGDFDKIVIEMPRDKNADDEKKFINKRNKENKKEKDDALKRAAYLYNGTDKLPDEVFHGNKQLETKIRLWYQQGERCLYSGKPIPIQELVHNSNNFEIDHILPLSLSFDDSLANKVLVYSWTNQEKGQKTPYQVIDSMDAAWSFREMKEYVLKQKGLGKKKRDYLLTTENIDKIEVKKKFIERNLVDTRYASRVVLNSLQSALRELGKDTKVSVVRGQFTSQLRRKWKIDKSRETYHHHAVDALIIAASSQLKLWEKQDNPMFVDYGNNQVVDKQTGEILSVSDNEYKELVFQPPYQGFVNTISSKGFEDEILFSYQVDSKYNRKVSDATIYSTRKAKIGKDKKEETYVLGKIKDIYSQNGFDTFVKKYNKDKTQFLMYQKDPLTWENVIEVILGDYPTTKKSEDGKNDVKCNPFEEYRRENGLICKYSKKGKGTPIKSLKYYDKKLGNCIDITPEESRNKVILQSINPWRADVYFNPETLKYELMGLKYSDLSFEKGTGNYHISQEKYDAIKEKEGIGKKSEFKFTLYRNDLILIKDIASGEQEIYRFLSRTMPNVNHYVELKPYDKEKFDNVQELVEALGEADKVGRCIKSLNKPNISIYKVRTDVLGNKYFVKKEGDKPKLDFKNNKK

SEQ ID NO: 467 - protein, 1134 aa, Streptococcus mitis
  Streptococcus mitis ATCC 6249
MNGLVLGLDIGIASEGVGILEKNSGKIIHANSRLFPAATADNNVERRKNRQARRLNRRKKHRGVRFQDLFEDYGLLTDFSKVSINLNPYRLRVDGLNQQLTNEELFIALKNIVKRRGISYLDDASEDGGAVSSDYGKAVEENRKLLAEQTPGQIQLERFEKYGQVRGDFTVVENGEKLRLINVFSTSAYKKEAERILRKQQEFNNQITDEFIEDYLKILTGKRKYYHGPGNEKSRTDYGRFRTDGTTLDNIFGILIGKCTFYPEEYRASKASYTAQEFNLLNDLNNLTVPTETKKLSEEQKKVIVEYAKEAKTLGASTLLKYIAKMIDASVDQIRGYRVDVNNKPEMHTFEVYRKMQSLETISVGELSRNVLDELAHILTLNTEREGMEEAINTKLKDSFSQDQVLELVQFRKNNSSLFSKGWHNFSLKLMMELIPELYETSEEQMTILTRLGKQKSKETSKRTKYIDEKELTEEIYNPVVAKSVRQAIKIINEATKKHGIFDNIVIEMARENNEEDAKKDYIKRQKANQDEKNAAMEKAAFQYNGKKELPDNIFHGHKELATKIRLWHQQGEKCLYTGKTIPISDLIYNQYKYEIDHILPLSLSFDDSLSNKVLALATANQEKGQRTPFQALDSMDDAWSYREFKSYVKDLKSLSNKKKDYLLTEEDISKIEVKQKFIERNLVDTRYSSRVVLNALQDFYKSHQFDTTISVVRGQFTSQLRRKWGLEKSRETYHHHAVDALIIAASSQLRLWKKQNNPLITYKEGQFVDSQTGEIISLTDDEYKELVFKAPYDHFVDTLSSKTFEDSILFSYQVDSKFNRKISDATIYATRKAKLDKEKKEYTYTLGKIKDIYSLGTKTPSKTGFYKFLDLYNKDKSQFLMFQKDRKTWDEVIEKIMEQYRPFKEYDKTGKLVDFNPFEKYRQENEPIRKYSKKGNGPEIKSLKYYDILLGKHKNITPEGSRNTVALLSLNPWRTDVYYNMETKKYEFLGLKYADLPFEEGGAYGISTETYNELREKEGIGKNSEFKFTLYKNDLILIKDTETNCQQIFRFWSRTGKDNPKSFEKHKIELKPYEKARFEKGEELEVLGKVPPSSNQLQKNMQIENLSIYKVKTDVLGNKHFIKKEGDKPKLKF

SEQ ID NO: 468 - protein, 1392 aa, Streptococcus mitis
  Streptococcus mitis SK321
MNNNNYSIGLDIGTNSVGWAVITDDYKVPSKKMKVLGNTDKHFIKKNLIGALLFDEGATAEDRRFKRTARRRYTRRKNRLRYLQEIFSEEMSKVDSSFFHRLDDSFLVPEDKRGSKYPIFATLAEEKEYHKKFPTIYHLRKHLADSKEKTDLRLIYLALAHMIKYRGHFLYEESFDIKNNDIQKIFSEFISIYDNTFEGSSLSGQNAQVEAIFTDKISKSAKRERILKLFAYEKSTDLFSEFLKLIVGNQADFKKHFDLEEKAPLQFSKDTYDEDLENLLGQIGDDFADLFLVAKKLYDAILLSGILTVTDSSTKAPLSASMIERYENHQKDLAALKQFIQNNLQEKYDEVFSDQSKDGYARYINGKTTQEAFYKYIKNLLSKFEGSDYFLDKIEREDFLRKQRTFDNGSIPHQIHLQEMNAIIRRQGEHYPFLKEYKEKIETILTFRIPYYVGPLARGNRNFAWLTRNSDQAIRPWNFEEIVDQASSAEEFINKMTNYDLYLPEEKVLPKHSLLYETFAVYNELTKVKFISEGLRDYQFLDSGQKKQIVNQLFKEKRKVTEKDIIQYLHNVDGYDGIELKGIEKQFNASLSTYHDLLKIIKDKEFMDDPKNEEILENIVHTLTIFEDREMIKQRLAQYASIFDKKVIKALTRRHYTGWGKLSAKLINGICDKKTGKTILDYLIDDGYSNRNFMQLINDDGLSFKDIIQKAQVVGKTNDVKQVVQELPGSPAIKKGILQSIKLVDELVKVMGHAPESIVIEIARENQTTARGKKNSQQRYKRIEDALKNLAPGLDSNILKEHPTDNIQLQNDRLFLYYLQNGKDMYTGEALDINQLSSYDIDHIVPQAFIKDDSLDNRVLTSSKDNRGKSDNVPSLEVVQKRKAFWQQLLDSKLISEHKFNNLTKAERGGLDERDKVGFIRRQLVETRQITKHVAQILDARFNTEVNEKDKKNRTVKIITLKSNLVSNFRKEFKLYKVREINDYHHAHDAYLNAVVAKAILKKYPKLEPGFVYGDYQKYDIKRYISRSKDPKEVEKATEKYFFYSNLLNFFKEEVHYADGTIVKRENIEYSKDTGEIAWNKEKDFATIKKVLSLPQVNIVKKTEIQTHGLDRGKPRGLFNSNPSPKPSEDRKENLVPIKQGLDPRKYGGYAGISNSYAVLVKAIIEKGAKKQQKTVLEFQGISILDKINFEKNKENYLLEKGYIKILSTITLPKYSLFEFPDGTRRRLASILSTNNKRGEIHKGNELVIPEKYTTLLYHAKNINKTLEPEHLEYVEKHRNDFAKLLEYVLNFNDKYVGALKNGERIRQAFIDWETVDIEKLCFSFIGPRNSKNAGLFELTSQGSASDFEFLGVKIPRYRDYTPSSLLNATLIHQSITGLYETRIDLSKLGED

SEQ ID NO: 469 - protein, 1345 aa, Streptococcus mutans
  Streptococcus mutans 11SSST2
MKKPYSIGLDIGTNSVGWAVVTDDYKVPAKKMKVLGNTDKSHIKKNLLGALLFDSGNTAADRRLKRTARRRYTRRRNRILYLQEIFAEEMSKVDDSFFHRLEDSFLVTEDKRGERHPIFGNLEEEVKYHENFPTIYHLRQYLADNPEKVDLRLVYLALAHIIKFRGHFLIEGKFDTRNNDVQRLFQEFLAVYDNTFENSSLQEQNVQVEEILTDKISKSAKKDRVLKLFPNEKSNGRFAEFLKLIVGNQADFKKHFELEEKAPLQFSKDTYEEELEVLLTQIGDNYAELFLSAKKLYDSILLSGILTVTDVSTKAPLSASMIQRYNEHQMDLAQLKQFIRQKLSDKYNEVFSDVSKDGYAGYIDGKTNQEAFYKYLKGLLNKIEGSGYFLDKIEREDFLRKQRTFDNGSIPHQIHLQEMRAIIRRQAEFYPFLADNQDRIEKILTFRIPYYVGPLARGKSDFAWLSRKSADKITPWNFDEIVDKESSAEAFINRMTNYDLYLPNQKVLPKHSLLYEKFTVYNELTKVKYKTEQGKTAFFDANMKQEIFDGVFKVYRKVTKDKLMDFLEKEFDEFRIVDLTGLDKENKAFNASYGTYHDLRKILDKDFLDNSKNEKILEDIVLTLTLFEDREMIRKRLENYSDLLTKEQVKKLERRHYTGWGRLSAELIHGIRNKESRKTLLDYLIDDGNSNRNFMQLINDDALSFKEEIAKAQVIGETDNLNQVVSDIAGSPAIKKGILQSLKIVDELVKIMGHQPENIVVEMARENQFTNQGRRNSQQRLKGLTDSIKEFGSQILKEHPVENSQLQNDRLFLYYLQNGRDMYTGEELDIDYLSQYDIDHIIPQAFIKDNSIDNRVLTSSKENRGKSDDVPSKDVVRKMKPYWSKLLSAKLITQRKFDNLTKAERGGLTDDDKAGFIKRQLVETRQITKHVARILDERFNTETDENNKKIRQVKIVTLKSNLVSNFRKEFELYKVREINDYHHAHDAYLNAVIGKALLGVYPQLEPEFVYGDYPHFHGHEENKATAKKFFYSNIMNFFKKDDVRTDKNGEIIWKKDEHISNIKKVLSYPQVNIVKKVEEQTGGFSKESILPKGNSDKLIPRKTKKFYWDTKKYGGFDSPIVAYSILVIADIEKGKSKKLKTVKALVGVTIMEKMTFERDPVAFLERKGYRNVQEENIIKLPKYSLFKLENGRKRLLASARELQKGNEIVLPNHLGTLLYHAKNIHKVDEPKHLDYVDKHKDEFKELLDVVSNFSKKYTLAEGNLEKIKELYAQNNGEDLKELSSSFINLLTFTAIGAPAAFKFFDKNIDRKRYTSTTEILNATLIHQSITGLYETRIDLSKLGGD

SEQ ID NO: 470 - protein, 1345 aa, Streptococcus mutans; identical to SEQ ID NO: 469
  Streptococcus mutans 11SSST2

SEQ ID NO: 471 - protein, 1345 aa, Streptococcus mutans
  Streptococcus mutans 11VS1
MKKPYSIGLDIGTNSVGWAVVTDDYKVPAKKMKVLGNTDKSHIKKNLLGALLFDSGNTAEDRRLKRTARRRYTRRRNRILYLQEIFSEEMGKVDDSFFHRLEDSFLVTEDKRGERHPIFGNLEEEVKYHENFPTIYHLRQYLADNPEKVDLRLVYLALAHIIKFRGHFLIEGKFDTRNNDVQRLFQEFLAVYDNTFENSSLQEQNVQVEEILTDKISKSAKKDRVLKLFPNEKSNGRFAEFLKLIVGNQADFKKHFELEEKAPLQFSKDTYEEELEVLLAQIGDNYAELFLSAKKLYDSILLSGILTVTDVSTKAPLSASMIQRYNEHQMDLAQLKQFIRQKLSDKYNEVFSDVSKDGYAGYIDGKTNQEAFYKYLKGLLNKIEGSGYFLDKIEREDFLRKQRTFDNGSIPHQIHLQEMRAIIRRQAEFYPFLADNQDRIEKILTFRIPYYVGPLARGKSDFAWLSRKSADKITPWNFDEIVDKESSAEAFINRMTNYDLYLPNQKVLPKHSLLYEKFTVYNELTKVKYKTEQGKTAFFDANMKQEIFDGVFKVYRKVTKDKLMDFLEKEFDEFRIVDLTGLDKENKVFNASYGTYHDLCKILDKDFLDNSKNEKILEDIVLTLTLFEDREMIRKRLENYSDLLTKEQVKKLERRHYTGWGRLSAELIHGIRNKESRKTILDYLIDDGNSNRNFMQLINDDALSFKEEIAKAQVIGETDNLNQVVSDIAGSPAIKKGILQSLKIVDELVKIMGHQPENIVVEMARENQFTKQGRRNSQQRLKGLTDSIKEFGSQILKEHPVENSQLQNDRLFLYYLQNGRDMYTGEELDIDYLSQYDIDHIIPQAFIKDNSIDNRVLTSSKENRGKSDDVPSKDVVRKMKSYWSKLLSAKLITQRKFDNLTKAERGGLTDDDKAGFIKRQLVETRQITKHVARILDERFYTETDENNKKIRQVKIVTLKSNLVSNFRKEFELYKVREINDYHHAHDAYLNAVIGKALLGVYPQLEPEFVYGDYPHFHGHKENKATAKKFFYSNIMNFFKKDDVRTDKNGEIIWKKDEHISNIKKVLSYPQVNIVKKVEEQTGGFSKESILPKGNSDKLIPRKTKKFYWDTKKYGGFDSPIVAYSILVIADIEKGKSKKLKTVKALVGVTIMEKMTFERDPVAFLERKGYRNVQEENIIKLPKYSLFKLENGRKRLLASARELQKGNEIVLPNHLGTLLYHAKNIHKVDEPKHLDYVDKHKDEFKELLDVVSNFSKKYTLAEGNLEKIKELYAQNNGEDLKELASSFINLLTFTAIGAPATFKFFDKNIDRKRYTSTTEILNATLIHQSITGLYETRIDLSKLGGD

SEQ ID NO: 472 - protein, 1345 aa, Streptococcus mutans
  Streptococcus mutans 14D
MKKPYSIGLDIGTNSVGWAVVTDDYKVPAKKMKVLGNTDKSHIKKNLLGALLFDSGNTAADRRLKRTARRRYTRRRNRILYLQEIFAEEMSKVDDSFFHRLEDSFLVTEDKRGERHPIFGNLEEEVKYHENFPTIYHLRQYLADNPEKVDLRLVYLALAHIIKFRGHFLIEGKFDTRNNDVQRLFQEFLAVYDNTFENSSLQEQNVQVEEILTDKISKSAKKDRVLKLFPNEKSNGRFAEFLKLIVGNQADFKKHFELEEKAPLQFSKDTYEEELEVLLAQIGDNYAELFLSAKKLYDSILLSGILTVTDVSTKAPLSASMIQRYNEHQMDLAQLKQFIRQKLSDKYNEVFSDVSKDGYAGYIDGKTNQEAFYKYLKGLLNKIEGSGYFLDKIEREDFLRKQRTFDNGSIPHQIHLQEMRAIIRRQAEFYPFLADNQDRIEKILTFRIPYYVGPLARGKSDFAWLSRKSADKITPWNFDEIVDKESSAEAFINRMTNYDLYLPNQKVLPKHSLLYEKFTVYNELTKVKYKTEQGKTAFFDANMKQEIFDGVFKVYRKVTKDKLMDFLEKEFDEFRIVDLTGLDKENKAFNASYGTYHDLRKILDKDFLDNSKNEKILEDIVLTLTLFEDREMIRKRLENYSDLLTKEQVKKLERRHYTGWGRLSAELIHGIRNKESRKTILDYLIDDGNSNRNFMQLINDDALSFKEEIAKAQVIGETDNLNQVVSDIAGSPAIKKGILQSLKIVDELVKIMGHQPENIVVEMARENQFTNQGRRNSQQRLKGLTDSIKEFGSQILKEHPVEHSQLQNDRLFLYYLQNGRDMYTGEELDIDYLSQYDIDHIIPQAFIKDNSIDNRVLTSSKENRGKSDDVPSKNVVRKMKSYWSKLLSAKLITQRKFDNLTKAERGGLTDDDKAGFIKRQLVETRQITKHVARILDERFHTETDENNKKIRQVKIVTLKSNLVSNFRKEFELYKVREINDYHHAHDAYLNAVIGKALLGVYPQLEPEFVYGDYPHFHGHKENKATAKKFFYSNIMNFFKKDDVRTDKNGEIIWKKDEHISNIKKVLSYPQVNIVKKVEEQTGGFSKESILPKGNSDKLIPRKTKKFYWDTKKYGGFDSPIVAYSILVIADIEKGKSKKLKTVKALVGVTIMEKMTFERDPVAFLERKGYRNVQEENIIKLPKYSLFKLENGRKRLLASARELQKGNEIVLPNHLGTLLYHAKNIHKVDEPKHLDYVDKHKDEFKELLDVVSNFSKKYTLAEGNLEKIKELYAQNNGEDLKELASSFINLLTFTAIGAPATFKFFDKNIDRKRYTSTTEILNATLIHQSITGLYETRIDLSKLGGD

SEQ ID NO: 473 - protein, 1355 aa, Streptococcus mutans
  Streptococcus mutans 15VF2
MKKSYSIGLDIGTNSVGWAVVTDDYKVPAKKMKVLGNTDKSHIKKNLLGALLFDSGNTAEDRRLKRTARRRYTRRRNRILYLQEIFSEEMGKVDDSFFHRLDESFLTDDDKNFDSHPIFGNKAEEDAYHQKFPTIYHLRKHLADSTEKADLRLVYLALAHMIKFRGHFLIEGELNAENTDVQKLFADFVGVYDRTFDDSHLSEITVDASSILTEKISKSRRLEKLINNYPKEKKNTLFGNLIALSLGLQPNFKTNFKLSEDAKLQFSKDTYEEDLEELLGKIGDDYADLFTLAKNLYDAILLSGILTADDSSTKAPLSASMIKRYAEHHEDLEKLKEFIKANKPELYHDIFKDETKNGYAGYIENGVKQDEFYKYLKNTLSKIAGSDYFLDKIEREDFLRKQRTFDNGSIPHQIHLQEMHAILRRQGDYYPFLKENQDRIEKILTFRIPYYVGPLARKNSRFAWAEYHSDEAVMPWNFDQVIDKESSAQAFIEHMTNNDLYLPNEKVLPKHSPLYEKYTVYNELTKIKYVTEIGEAKFFDANLKQEIFDGLFKHERKVTKKKLRTFLDKNFDEFRIVDIQGLDKETETFNASYATYQDLLKVIKDKVFMDNPENAEILENIVLTLTLFEDREMIKQRLAKYADVFDKKVIDQLARRHYTGWGRLSAKLLNGIRDKQSCKTIMDYLIDDAQSNRNLMQLITDDNLTFKDDIVKAQYVDNSDDLHQVVQSLAGSPAIKKGILQSLKIVDELVKVMGKEPEQIVVEMARENQTTAKGRRNSQQRYKRLKEAIKSLDRDLNHKILKEHPTDNQALQNNRLFLYYLQNGRDMYTGESLDINRLSDYDIDHVIPQAFIKDNSIDNRVLTSSKANRGKSDDVPSEDVVNRMRPFWNKLLSSGLISQRKYNNLTKKELTPDDKAGFIKRQLVETRQITKHVARMLDERFNKEFDDNNKRIRRVKIVTLKSNLVSSFRKEFELYKVREINDYHHAHDAYLNAVVVKALLVKYPKLEPEFVYGEYPKYNSYRERKTATQKMFFYSNIMNMFKSKVKLADDQIVERPMIEVNDETGEIAWDKTKHITTVKKVLSYPQVNIVKKVEEQTIGQNGGLFDDNPKSPLEVIPSKLVPLKKALNPEKYGGYQKPTTAYPILLIVDTKQLIPISVMDKKRFEQNPVKFLKDKGYQQIEKNNFVKLPKYTLVDIGNGIKRLWASSKEVHKGNQLVVSKKSQDLLYHAHHLDNDYSNEYVKNHYQQFDILFNEITSFSKKCKLGKEHIQKIEEAYSKERDSASIEELADGFIKLLGFTQLGATSPFSFLGIKLNQKQYTGKKDYLLPCMEATLIHQSITGLYETRIDLNKLGGD

SEQ ID NO: 474 - protein, 1355 aa, Streptococcus mutans; identical to SEQ ID NO: 473
  Streptococcus mutans 15VF2

SEQ ID NO: 475 - protein, 1345 aa, Streptococcus mutans
  Streptococcus mutans 1SM1
MKKPYSIGLDIGTNSVGWAVVTDDYKVPAKKMKVLGNTDKSHIKKNLLGALLFDSGNTAEDRRLKRTARRRYTRRRNRILYLQEIFSEEMGKVDDSFFHRLEDSFLVTEDKRGERHPIFGNLEEEVKYHENFPTIYHLRQYLADNPEKVDLRLVYLALAHIIKFRGHFLIEGKFDTRNNDVQRLFQEFLAVYDNTFENSSLQEQNVQVEEILTDKISKSAKKDRVLKLFPNEKSNGRFAEFLKLIVGNQADFKKHFELEEKAPLQFSKDTYEEDLEELLGKIGDDYADLFTLAKNLYDAILLSGILTADDSSTKAPLSASMIQRYNEHQMDLAQLKQFIRQKLSDKYNEVFSDVSKDGYAGYIDGKTNQEAFYKYLKGLLNKIEGSGYFLDKIEREDFLRKQRTFDNGSIPHQIHLQEMRAIIRRQAEFYPFLADNQDRIEKILTFRIPYYVGPLARGKSDFAWLSRKSADKITPWNFDEIVDKESSAEAFINRMTNYDLYLPNQKVLPKHSLLYEKFTVYNELTKVKYKTEQGKTAFFDANMKQEIFDGVFKVYRKVTKDKLMDFLEKEFDEFRIVDLTGLDKENKVFNASYGTYHDLCKILDKDFLDNSKNEKILEDIVLTLTLFEDREMIRKRLENYSDLLTKEQVKKLERRHYTGWGRLSAELIHGIRNKESRKTILDYLIDDGNSNRNFMQLINDDALSFKEEIAKAQVIGETDNLNQVVSDIAGSPAIKKGILQSLKIVDELVKIMGHQPENIVVEMARENQFTNQGRRNSQQRLKGLTDSIKEFGSQILKEHPVENSQLQNDRLFLYYLQNGRDMYTGEELDIDYLSQYDIDHIIPQAFIKDNSIDNRVLTSSKENRGKSDDVPSKDVVRKMKSYWSKLLSAKLITQRKFDNLTKAERGGLTDDDKAGFIKRQLVETRQITKHVARILDERFYTETDENNKKIRQVKIVTLKSNLVSNFRKEFELYKVREINDYHHAHDAYLNAVIGKALLGVYPQLEPEFVYGDYPHFHGHKENKATAKKFFYSNIMNFFKKDDVRTDKNGEIIWKKDEHISNIKKVLSYPQVNIVKKVEEQTGGFSKESILPKGNSDKLIPRKTKKFYWDTKKYGGFDSPIVAYSILVIADIEKGKSKKLKTVKALVGVTIMEKMTFERDPVAFLERKGYRNVQEENIIKLPKYSLFKLENGRKRLLASARELQKGNEIVLPNHLGTLLYHAKNIHKVDEPKHLDYVDKHKDEFKELLDVVSNFSKKYTLAEGNLEKIKELYAQNNGEDLKELASSFINLLTFTAIGAPATFKFFDKNIDRKRYTSTTEILNATLIHQSITGLYETRIDLSKLGGD

SEQ ID NO: 476 - protein, 1345 aa, Streptococcus mutans; identical to SEQ ID NO: 475
  Streptococcus mutans 1SM1

SEQ ID NO: 477 - protein, 1350 aa, Streptococcus mutans
  Streptococcus mutans 24
MKKPYSIGLDIGTNSVGWAVVTDDYKVPAKKMKVLGNTDKSHIEKNLLGALLFDSGNTAEDRRLKRTARRRYTRRRNRILYLQEIFSEEMGKVDDSFFHRLEDSFLVTEDKRGERHPIFGNLEEEVKYHENFPTIYHLRQYLADNPEKVDLRLVYLALAHIIKFRGHFLIEGKFDTRNNDVQRLFQEFLAVYDNTFENSSLQEQNVQVEEILTDKISKSAKKDRVLKLFPNEKSNGRFAEFLKLIVGNQADFKKHFELEEKAPLQFSKDTYEEELEVLLAQIGDNYAELFLSAKKLYDSILLSGILTVTDVSTKAPLSASMIQRYNEHQMDLTQLKQFIRQKLSDKYNEVFSDVSKDGYAGYIDGKTNQEAFYKYLKGLLNKIEGSGYFLDKIEREDFLRKQRTFDNGSIPHQIHLQEMRAIIRRQAEFYPFLADNQDRIEKILTFRIPYYVGPLARGKSDFAWLSRKSADKITPWNFDEIVDKESSAEAFINRMTNYDLYLPNQKVLPKHSLLYEKFTVYNELTKVKYKTEQGKTAFFDANMKQEIFDGVFKVYRKVTKDKLMDFLEKEFDEFRIVDLTGLDKENKAFNASYGTYHDLRKILDKDFLDNSKNEKILEDIVLTLTLFEDREMIRKRLKNYSDLLTKEQLKKLERRHYTGWGRLSAELIHGIRNKESRKTILDYLIDDGNSNRNFMQLINDDALSFKEEIAKAQVIGETDNLNQVVSDIAGSPAIKKGILQSLKIVDELVKIMGHQPENIVVEMARENQFTNQGRQNSQQRLKGLTDSIKEFGSQILKEHPVENSQLQNDRLFLYYLQNGRDMYTGEELDIDYLSQYDIDHIIPQAFIKDNSIDNRVLTSSKENRGKSDDVPSEDVVNRMRPFWNKLLSSGLISQRKYNNLTKKELTLDDKAGFIKRQLVETRQITKHVARMLDERFNKEFDDNNKRICKVKIVTLKSNLVSSFRKEFELYKVREINDYHHAHDAYLNAVVVKALLVKYSKLEPEFVYGEYPKYNSYRERKTATQKMFFYSNIMNMFKSKVKLADDQIVERPMIEVNDETGEIAWDKTKHITTVKKVLSYPQVNIVKKVEEQTIGQNGGLFDDNPKSPLEVIPSKLVPLKKALNPEKYGGYQKPTTAYPILLIVDTKQLIPISVMDKKRFEQNPVKFLKDKGYQQIEKNNFVKLPKYTLVDIGNGIKRLWASSKEVHKGNQLVVSKKSQDLLYHAHHLDNDYSNEYVKNHYQQFDILFNEITSFSKKCKLGKEHIQKIEEAYSKERDSASIEELADGFIKLLGFTQLGATSPFSFLGIKLNQKQYTGKKDYLLPCMEATLIHQSITGLYETRIDLSKLGGD

SEQ ID NO: 478 - protein, 1350 aa, Streptococcus mutans; identical to SEQ ID NO: 477
  Streptococcus mutans 24

SEQ ID NO: 479 - protein, 1345 aa, Streptococcus mutans; identical to SEQ ID NO: 472
  Streptococcus mutans 2VS1

SEQ ID NO: 480 - protein, 1345 aa, Streptococcus mutans; identical to SEQ ID NO: 472
  Streptococcus mutans 2VS1

SEQ ID NO: 481 - protein, 1345 aa, Streptococcus mutans; identical to SEQ ID NO: 471
  Streptococcus mutans 3SN1

SEQ ID NO: 482 - protein, 1345 aa, Streptococcus mutans; identical to SEQ ID NO: 471
  Streptococcus mutans 3SN1

SEQ ID NO: 483 - protein, 1345 aa, Streptococcus mutans
  Streptococcus mutans 4SM1
MKKPYSIGLDIGTNSVGWAVVTDDYKVPAKKMKVLGNTDKSHIKKNLLGALLFDSGNTAEDRRLKRTARRRYTRRRNRILYLQEIFSEEMGKVDDSFFHRLEDSFLVTEDKRGERHPIFGNLEEEVKYHENFPTIYHLRQYLADNPEKVDLRLVYLALAHIIKFRGHFLIEGKFDTRNNDVQRLFQEFLAVYDNTFENSSLQEQNVQVEEILTDKISKSAKKDRVLKLFPNEKSNGRFAEFLKLIVGNQADFKKHFELEEKAPLQFSKDTYEEDLEELLGKIGDDYADLFTLAKNLYDAILLSGILTADDSSTKAPLSASMIQRYNEHQMDLAQLKQFIRQKLSDKYNEVFSDVSKDGYAGYIDGKTNQEAFYKYLKGLLNKIEGSGYFLDKIEREDFLRKQRTFDNGSIPHQIHLQEMRAIIRRQAEFYPFLADNQDRIEKILTFRIPYYVGPLARGKSDFAWLSRKSADKITPWNFDEIVDKESSAEAFINRMTNYDLYLPNQKVLPKHSLLYEKFTVYNELTKVKYKTEQGKTAFFDANMKQEIFDGVFKVYRKVTKDKLMDFLEKEFDEFRIVDLTGLDKENKVFNASYGTYHDLCKILDKDFLDNSKNEKILEDIVLTLTLFEDREMIRKRLENYSDLLTKEQVKKLERRHYTGWGRLSAELIHGIRNKESRKTILDYLIDDGNSNRNFMQLINDDALSFKEEIAKAQVIGETDNLNQVVSDIAGSPAIKKGILQSLKIVDELVKIMGHQPENIVVEMARENQFTNQGRRNSQQRLKGLTDSIKEFGSQILKEHPVENSQLQNDRLFLYYLQNGRDMYTGEELDIDYLSQYDIDHIIPQAFIKDNSIDNRVLTSSKENRGKSDDVPSKDVVRKMKPYWSKLLSAKLITQRKFDNLTKAERGGLTDDDKAGFIKRQLVETRQITKHVARILDERFNTETDENNKKIRQVKIVTLKSNLVSNFRKEFELYKVREINDYHHAHDAYLNAVIGKALLGVYPQLEPEFVYGDYPHFHGHEENKATAKKFFYSNIMNFFKKDDVRTDKNGEIIWKKDEHISNIKKVLSYPQVNIVKKVEEQTGGFSKESILPKGNSDKLIPRKTKKFYWDTKKYGGFDSPIVAYSILVIADIEKGKSKKLKTVKALVGVTIMEKMTFERDPVAFLERKGYRNVQEENIIKLPKYSLFKLENGRKRLLASARELQKGNEIVLPNHLGTLLYHAKNIHKVDEPKHLDYVDKHKDEFKELLDVVSNFSKKYTLAEGNLEKIKELYAQNNGEDLKELASSFINLLTFTAIGAPATFKFFDKNIDRKRYTSTTEILNATLIHQSITGLYETRIDLSKLGGD

SEQ ID NO: 484 - protein, 1345 aa, Streptococcus mutans; identical to SEQ ID NO: 483
  Streptococcus mutans 4SM1

SEQ ID NO: 485 - protein, 1345 aa, Streptococcus mutans
  Streptococcus mutans 4VF1
MKKPYSIGLDIGTNSVGWAVVTDDYKVPAKKMKVLGNTDKSHIKKNLLGALLFDSGNTAEDRRLKRTARRRYTRRRNRILYLQEIFSEEMGKVDDSFFHRLEDSFLVTEDKRGERHPIFGNLEEEVKYHENFPTIYHLRQYLADNPEKVDLRLVYLALAHIIKFRGHFLIEGKFDTRNNDVQRLFQEFLAVYDNTFENSSLQEQNVQVEEILTDKISKSAKKDRVLKLFPNEKSNGRFAEFLKLIVGNQADFKKHFELEEKAPLQFSKDTYEEELEVLLAQIGDNYAELFLSAKKLYDSILLSGILTVTDVSTKAPLSASMIQRYNEHQMDLAQLKQFIRQKLSDKYNEVFSDVSKDGYAGYIDGKTNQEAFYKYLKGLLNKIEGSGYFLDKIEREDFLRKQRTFDNGSIPHQIHLQEMRAIIRRQAEFYPFLADNQDRIEKILTFRIPYYVGPLARGKSDFAWLSRKSADKITPWNFDEIVDKESSAEAFINRMTNYDLYLPNQKVLPKHSLLYEKFTVYNELTKVKYKTEQGKTAFFDANMKQEIFDGVFKVYRKVTKDKLMDFLEKEFDEFRIVDLTGLDKENKVFNASYGTYHDLCKILDKDFLDNSKNEKILEDIVLTLTLFEDREMIRKRLENYSDLLTKEQVKKLERRHYTGWGRLSAELIHGIRNKESRKTILDYLIDDGNSNRNFMQLINDDALSFKEEIAKAQVIGETDNLNQVVSDIAGSPAIKKGILQSLKIVDELVKIMGHQPENIVVEMARENQFTKQGRRNSQQRLKGLTDSIKEFGSQILKEHPVENSQLQNDRLFLYYLQNGRDMYTGEELDIDYLSQYDIDHIIPQAFIKDNSIDNRVLTSSKENRGKSDDVPSKDVVRKMKSYWSKLLSAKLITQRKFDNLTKAERGGLTDDDKAGFIKRQLVETRQITKHVARILDERFYTETDENNKKIRQVKIVTLKSNLVSNFRKEFELYKVREINDYHHAHDAYLNAVIGKALLGVYPQLEPEFVYGDYPHFHGHKENKATAKKFFYSNIMNFFKKDDVRTDRNGEIIWKKDEHISNIKKVLSYPQVNIVKKVEEQTGGFSKESILPKGNSDKLIPRKTKKFYWDTKKYGGFDSPIVAYSILVIADIEKGKSKKLKTVKALVGVTIMEKMTFERDPVAFLERKGYRNVQEENIIKLPKYSLFKLENGRKRLLASARELQKGNEIVLPNHLGTLLYHAKNIHKVDEPKHLDYVDKHKDEFKELLDVVSNFSKKYTLAEGNLEKIKELYAQNNGEDLKELASSFINLLTFTAIGAPATFKFFDKNIDRKRYTSTTEILNATLIHQSITGLYETRIDLSKLGGD

SEQ ID NO: 486 - protein, 1345 aa, Streptococcus mutans; identical to SEQ ID NO: 485
  Streptococcus mutans 4VF1

SEQ ID NO: 487 - protein, 1345 aa, Streptococcus mutans
  Streptococcus mutans 5SM3
MKKPYSIGLDIGTNSVGWAVVTDDYKVPAKKMKVLGNTDKSHIEKNLLGALLFDSGNTAEDRRLKRTARRRYTRRRNRILYLQEIFSEEMGKVDDSFFHRLEDFFLVTEDKRGERHPIFGNLEEEVKYHENFPTIYHLRQYLADNPEKVDLRLVYLALAHIIKFRGHFLIEGKFDTRNNDVQRLFQEFLAVYDNTFENSSLQEQNVQVEEILTDKISKSAKKDRVLKLFPNEKSNGRFAEFLKLIVGNQADFKKHFELEEKAPLQFSKDTYEEELEVLLAQIGDNYAELFLSAKKLYDSILLSGILTADDSSTKAPLSASMIQRYNEHQMDLAQLKQFIRQKLSDKYNEVFSDVSKDGYAGYIDGKTNQEAFYKYLKGLLNKIEGSGYFLDKIEREDFLRKQRTFDNGSIPHQIHLQEMRAIIRRQSEFYPFLADNQDRIEKILTFRIPYYVGPLARGKSDFAWLSRKSADKITPWNFDEIVDKESSAEAFINRMTNYDLYLPNQKVLPKHSLLYEKFTVYNELTKVKYKTEQGETAFFDANMKQEIFDGVFKVYRKVTKDKLMDFLEKEFDEFRIVDLTGLDKENKAFNASYGTYHDLRKILDKDFLDNSKNEKILEDIVLTLTLFEDREMIRKRLKNYSDLLTKEQLKKLERRHYTGWGRLSAELIHGIRNKESRKTILDYLIDDGNSNRNFMQLINDDALSFKEEIAKAQVIGETDNLNQVVSDIAGSPAIKKGILQSLKIVDELVKIMGHQPENIVVEMARENQFTNQGRRNSQQRLKGLTDSIKEFGSQILKEHPVENSQLQNDRLFLYYLQNGRDMYTGEELDIDYLSQYDIDHIIPQAFIKDNSIDNRVLTSSKENRGKSDDVPSKDVVRKMKPYWSKLLSAKLITQRKFDNLTKAERGGLTDDDKAGFIKRQLVETRQITKHVARILDERFNTETDENNKKIRQVKIVTLKSNLVSNFRKEFELYKVREINDYHHAHDAYLNAVIGKALLGVYPQLEPEFVYGDYPHFHGHEENKATAKKFFYSNIMNFFKKDDVRTDKNGEIIWKKDEHISNIKKVLSYPQVNIVKKVEEQTGGFSKESILPKGNSDKLIPRKTKKFYWDTKKYGGFDSPIVAYSILVIADIEKGKSKKLKTVKALVGVTIMEKMTFERDPVAFLERKGYRNVQEENIIKLPKYSLFKLENGRKRLLASARELQKGNEIVLPNHLGTLLYHAKNIHKVDEPKHLDYVDKHKDEFKELLDVVSNFSKKYTLAEGNLEKIKELYAQNNGEDLKELASSFINLLTFTAIGAPATFKFFDKNIDRKRYTSTTEILNATLIHQSITGLYETRIDLSKLGGD

SEQ ID NO: 488 - protein, 1345 aa, Streptococcus mutans; identical to SEQ ID NO: 487
  Streptococcus mutans 5SM3

SEQ ID NO: 489 - protein, 1359 aa, Streptococcus mutans
  Streptococcus mutans 66-2A
MKKPYSIGLDIGTNSVGWAVVTDDYKVPAKKMKVLGNTDKSHIKKNLLGALLFDSGNTAEDRRLKRTARRRYTRRRNRILYLQEIFAEEMMQVDESFFQRLDDSFLVEEDKRGSRYPIFGTLKEEKKYHKEFKTIYHLREKLANSTEKADLRLVYLSLAHMIKFRGHFLIEGQLKAENTNVQALFKDFVEVYDKTVEESHLSEMTVDALSILTEKVSKSRRLENLVECYPTEKKNTLFGNLIALSLGLQPNFKTNFQLSEDAKLQFSKDTYEEDLEGLLGEIGDEYADLFASAKNLYDAILLSGILAVDDNTTKAPLSASMVKRYKEHKEELAAFKRFIKEKLPKKYEEIFKDDTKNGYAGYVGADKKLRKRSGKLATEEEFYKYVKGILNKVEGADVWLDKIDREDFLRKQRTFDNGSIPHQIHLQEMHAILRRQGEHYPFLKENQDKIEKILTFRIPYYVGPLVRKGSRFAWAEYKADEKITPWNFDDILDKEKSAEKFITRMTLNDLYLPEEKVLPKHSLLYETFTVYNELTKVKYVNEQGEAKFFDANMKQEIFDHVFKENRKVTKDKLLNYLNKEFEEFRIVNLTGLDKENKVFNSSLGTYHDLRKILNKSFLDNKENEQIIEDIIQTLTLFEDREMIRQRLQKYSDIFTKAQLKKLERRHYTGWGRLSYKLINGIRDKQSNKTILGYLIDDGYSNRNFMQLINDDALSFKEEIAKAQVIGEMDGLNQVVSDIAGSPAIKKGILQSLKIVDELVKVMGHNPANIVIEMARENQTTAKGRRSSQKRYKRLEEAIKNLDHDLNHKILKEHPTDNQALQNDRLFLYYLQNGRDMYTEDPLDINRLSDYDIDHIIPQAFIKDNSIDNRVLTRSDKNRGKSDDVPSEEVVHKMKPFWSKLLSAKLITQRKFDNLTKAERGGLTDDDKAGFIKRQLVETRQITKHVARILDERFNTETDENNKKIRQVKIVTLKSNLVSNFRKEFELYKVREINDYHHAHDAYLNAVIGKALLGVYPQLEPEFVYGDYPHFHGHKENKATAKKFFYSNIMNFFKKGDVRTDKNGEIIWKKDEHISNIKKVLSYPQVNIVKKVEEQTGGFSKESILPKGNSDKLIPRKTKKFYWDTKKYGGFDSPIVAYSILVIADIEKGKSKKLKTVKALVGVTIMEKMTFERDPVAFLERKGYRNVQEENIIKLPKYSLFKLENGRKRLLASARELQKGNEIVLPNHLETLLYHAKNIHKVDEPKHLDYVDKHKDEFKELLDVVSNFSKKYTLAEGNLEKIKELYAQNNGEDLKELASSFINLLTFTAIGAPAAFKFFDKNIDRKRYTSTTEILNATLIHQSITGLYETRIDLNKLGGD

SEQ ID NO: 490 - protein, 1359 aa, Streptococcus mutans; identical to SEQ ID NO: 489
  Streptococcus mutans 66-2A

SEQ ID NO: 491 - protein, 1345 aa, Streptococcus mutans
  Streptococcus mutans 8ID3
MKKPYSIGLDIGTNSVGWAVVTDDYKVPAKKMKVLGNTDKSHIEKNLLGALLFDSGNTAEDRRLKRTARRRYTRRRNRILYLQEIFSEEMGKVDDSFFHRLEDSFLVTEDKRGERHPIFGNLEEEVKYHENFPTIYHLRQYLADNPEKVDLRLVYLALAHIIKFRGHFLIEGKFDTRNNDVQRLFQEFLAVYDNTFENSSLQEQNVQVEEILTDKISKSAKKDRVLKLFPNEKSNGRFAEFLKLIVGNQADFKKHFELEEKAPLQFSKDTYEEELEVLLAQIGDNYAELFLSAKKLYDSILLSGILTVTDVGTKAPLSASMIQRYNEHQMDLAQLKQFIRQKLSDKYNEVFSDVSKDGYAGYIDGKTNQEAFYKYLKGLLNKIEGSGYFLDKIEREDFLRKQRTFDNGSIPHQIHLQEMRAIIRRQAEFYPFLADNQDRIEKLLTFRIPYYVGPLARGKSDFAWLSRKSADKITPWNFDEIVDKESSAEAFINRMTNYDLYLPNQKVLPKHSLLYEKFTVYNELIKVKYKTEQGKTAFFDANMKQEIFDGVFKVYRKVTKDKLMDFLEKEFDEFRIVDLTGLDKENKVFNASYGTYHDLCKILDKDFLDNSKNEKILEDIVLTLTLFEDREMIRKRLENYSDLLTKEQVKKLERRHYTGWGRLSAELIHGIRNKESRKTILDYLIDDGNSNRNFMQLINDDALSFKEEIAKAQVIGETDNLNQVVSDIAGSPAIKKGILQSLKIVDELVKIMGHQPENIVVEMARENQFTNQGRRNSQQRLKGLTDSIKEFGSQILKEHPVENSQLQNDRLFLYYLQNGRDMYTGEELDIDYLSQYDIDHIIPQAFIKDNSIDNRVLTSSKENRGKSDDVPSKDVVRKMKSYWSKLLSAKLITQRKFDNLTKAERGGLTDDDKAGFIKRQLVETRQITKHVARILDERFNTETDENNKKIRQVKIVTLKSNLVSNFRKEFELYKVREINDYHHAHDAYLNAVIGKALLGVYPQLEPEFVYGDYPHFHGHKENKATAKKFFYSNIMNFFKKDDVRTDKNGEIIWKKDEHISNIKKVLSYPQVNIVKKVEEQTGGFSKESILPKGNSDKLIPRKTKKFYWDTKKYGGFDSPIVAYSILVIADIEKGKSKKLKTVKALVGVTIMEKMTFERDPVAFLERKGYRNVQEENIIKLPKYSLFKLENGRKRLLASARELQKGNEIVLPNHLGTLLYHAKNIHKVDEPKHLDYVDKHKDEFKELLDVVSNFSKKYTLAEGNLEKIKELYAQNNGEDLKELASSFINLLTFTAIGAPATFKFFDKNIDRKRYTSTTEILNATLIHQSITGLYETRIDLNKLGGD

SEQ ID NO: 492 - protein, 1345 aa, Streptococcus mutans; identical to SEQ ID NO: 491
  Streptococcus mutans 8ID3

SEQ ID NO: 493 - protein, 1345 aa, Streptococcus mutans
  Streptococcus mutans A19
MKKPYSIGLDIGTNSVGWSVVTDDYKVPAKKMKVLGNTDKSHIEKNLLGALLFDSGNTAEDRRLKRTARRRYTRRRNRILYLQEIFSEEMGKVDDSFFHRLEDSFLVTEDKRGERHPIFGNLEEEVKYHENFPTIYHLRQYLADNPEKVDLRLVYLALAHIIKFRGHFLIEGKFDTRNNDVQRLFQEFLAVYDNTFENSSLQEQNVQVEEILTDKISKSAKKDRVLKLFPNEKSNGRFAEFLKLIVGNQADFKKHFELEEKAPLQFSKDTYEEELEVLLAQIGDNYAELFLSAKKLYDSILLSGILTVTDVGTKAPLSASMIQRYNEHQMDLAQLKQFIRQKLSDKYNEVFSDVSKDGYAGYIDGKTNQEAFYKYLKGLLNKIEGSGYFLDKIEREDFLRKQRTFDNGSIPHQIHLQEMRAIIRRQAEFYPFLADNQDRIEKLLTFRIPYYVGPLARGKSDFAWLSRKSADKITPWNFDEIVDKESSAEAFINRMTNYDLYLPNQKVLPKHSLLYEKFTVYNELTKVKYKTEQGKTAFFDANMKQEIFDGVFKVYRKVTKDKLMDFLEKEFDEFRIVDLTGLDKENKVFNASYGTYHDLCKILDKDFLDNSKNEKILEDIVLTLTLFEDREMIRKRLENYSDLLTKEQVKKLERRHYTGWGRLSAELIHGIRNKESRKTILDYLIDDGNSNRNFMQLINDDALSFKEEIAKAQVIGETDNLNQVVSDIAGSPAIKKGILQSLKIVDELVKIMGHQPENIVVEMARENQFTNQGRRNSQQRLKGLTDSIKEFGSQILKEHPVENSQLQNDRLFLYYLQNGRDMYTGEELDIDYLSQYDIDHIIPQAFIKDNSIDNRVLTSSKENRGKSDDVPSKDVVRKMKSYWSKLLSAKLITQRKFDNLTKAERGGLTDDDKAGFIKRQLVETRQITKHVARILDERFNTETDENNKKIRQVKIVTLKSNLVSNFRKEFELYKVREINDYHHAHDAYLNAVIGKALLGVYPQLEPEFVYGDYPHFHGHKENKATAKKFFYSNIMNFFKKDDVRIDKNGEIIWKKDEHISNIKKVLSYPQVNIVKKVEEQTGGFSKESILPKGNSDKLIPRKTKKFYWDTKKYGGFDSPIVAYSILVIADIEKGKSKKLKTVKALVGVTIMEKMTFERDPVAFLERKGYRNVQEENIIKLPKYSLFKLENGRKRLLASARELQKGNEIVLPNHLGTLLYHAKNIHKVDEPKHLDYVDKHKDEFKELLDVVSNFSKKYTLAEGNLEKIKELYAQNNGEDLKELASSFINLLTFTAIGAPATFKFFDKNIDRKRYTSTTEILNATLIHQSITGLYETRIDLSKLGGD

SEQ ID NO: 494 - protein, 1345 aa, Streptococcus mutans; identical to SEQ ID NO: 493
  Streptococcus mutans A19

SEQ ID NO: 495 - protein, 1345 aa, Streptococcus mutans; identical to SEQ ID NO: 472
  Streptococcus mutans B

SEQ ID NO: 496 - protein, 1345 aa, Streptococcus mutans; identical to SEQ ID NO: 472
  Streptococcus mutans G123

SEQ ID NO: 497 - protein, 1345 aa, Streptococcus mutans
MKKPYSIGLDIGTNSVGWAVVTDDYKVPAKKMKVLGNTDKSHIKKNLLGALLFDSGNTAEDRRLKRTARRRYTRRRNRILYLQEIFSEEMGKVDDSFFHRLDESFLTDDDKNFDSHPIFGNKAEEDAYHQKFPTIYHLRKHLADSTEKADLRLVYLALAHMIKFRGHFLIEGELNAENTDVQKLFADFVGVYDRTFDDSHLSEITVDASSILTEKISKSRRLEKLINNYPKEKKNTLFGNLIALSLGLQPNFKTNFKLSEDAKLQFSKDTYEEELEVLLAQIGDNYAELFLSAKKLYDSILLSGILTVTDVSTKAPLSASMIQRYNEHQMDLAQLKQFIRQKLSDKYNEVFSDVSKDGYAGYIDGKTNQEAFYKYLKGLLNKIEGSGYFLDKIEREDFLRKQRTFDNGSIPHQIHLQEMRAIIRRQAEFYPFLADNQDRIEKILTFRIPYYVGPLARGKSDFAWLSRKSADKITPWNFDEIVDKESSVEAFINRMTNYDLYLPNQKVLPKHSLLYEKFTVYNELTKVKYKTEQGKTAFFDANMKQEIFDGVFKVYRKVTKDKLMDFLEKEFDEFRIVDLTGLDKENKAFNASYGTYHDLRKILDKDFLDNSKNEKILEDIVLTLTLFEDREMIRKRLKNYSDLLTKEQLKKLERRHYTGWGRLSAELIHGIRNKESRKTILDYLIDDGNSNRNFMQLINDDALSFKEEIAKAQVIGETDNLNQVVSDIAGSPAIKKGILQSLKIVDELVKIMGHQPENIVVEMARENQFTNQGRRNSQQRLKGLTDSIKEFGSQILKEHPVENSQLQNDRLFLYYLQNGRDMYTGEELDIDYLSQYDIDHIIPQAFIKDNSIDNRVLTSSKENRGKSDDVPSKDVVRKMKSYWSKLLSAKLITQRKFDNLTKGERGGLTDDDKAGFIKRQLVETRQITKHVARILDERFNTETDENNKKIRQVKIVTLKSNLVSNFRKEFELYKVREINDYHHAHDAYLNAVIGKALLGVYPQLEPEFVYGDYPHFHGHKENKATAKKFFYSNIMNFFKKDDVRTDKNGEIIWKKDEYISNIKKVLSYPQVNIVKKVEEQTGGFSKESILPKGDSDKLIPRKTKKFYWDTKKYGGFDSPIVAYSILVIADIEKGKSKKLKTVKALVGVTIMEKMTFERDPVAFLERKGYRNVQEENIIKLPKYSLFKLENGRKRLLASARELQKGNEIVLPNHLGTLLYHAKNIHKVDEPKHLDYVDKHKDEFKELLDVVSNFSKKYTLAEGNLEKIKELYAQNNGEDLKELASSFINLLTFTAIGAPATFKFFDKNIDRKRYTSTTEILNATLIHQSITGLYETRIDLSKLGGD

SEQ ID NO: 498 - protein, 1345 aa, Streptococcus mutans
MKKPYSIGLDIGTNSVGWAVVTDDYKVPDKKMKVLGNTDKSHIKKNLLGALLFDSGNTAEDRRLKRTARRRYTRRRNRILYLQEIFSEEMGKVDDSFFHRLEDSFLVTEDKRGERHPIFGNLEEEVKYHENFPTIYHLRQYLADNPEKTDLRLVYLALAHIIKFRGHFLIEGKFDTRNNDVQRLFQEFLAVYDNTFENSSLQEQNVQVEEILTDKISKSAKKDRVLKLFPNEKSNGRFAEFLKLIVGNQADFKKHFELEEKAPLQFSKDIYEEELEVLLAQIGDNYAELFLSAKKLYDSILLSGILTVTDVSTKAPLSASMIQRYNEHQMDLAQLKQFIRQKLSDKYNEVFSDVSKDGYAGYIDGKTNQEAFYKYLKGLLNKIEGSGYFLDKIEREDFLRKQRTFDNGSIPHQIHLQEMRAIIRRQAEFYPFLADNQDRIEKILTFRIPYYVGPLARGKSDFAWLSRKSADKITPWNFDEIVDKESSVEAFINRMTNYDLYLPNQKVLPKHSLLYEKFTVYNELTKVKYKTEQGKTAFFDANMKQEIFDGVFKVYRKVTKDKLMDFLEKEFDEFRIVDLTGLDKENKAFNASYGTYHDLRKILDKDFLDNSKNEKILEDIVLTLTLFEDREMIRKRLKNYSDLLTKEQLKKLERRHYTGWGRLSAELIHGIRNKESRKTILDYLIDDGNSNRNFMQLINDDALSFKEEIAKAQVIGETDNLNQVVSDIAGSPAIKKGILQSLKIVDELVKIMGHQPENIVVEMARENQFTNQGRRNSQQRLKGLTDSIKEFGSQILKEHPVENSQLQNDRLFLYYLQNGRDMYTGEELDIDYLSQYDIDHIIPQAFIKDNSIDNRVLTSSKENRGKSDDVPSKDVVRKMKSYWSKLLSAKLITQRKFDNLTKAERGGLTDDDKAGFIKRQLVETRQITKHVARILDERFYTETDENNKKIRQVKIVTLKSNLVSNFRKEFELYKVREINDYHHAHDAYLNAVIGKALLGVYPQLEPEFVYGDYPHFHGHKENKATAKKFFYSNIMNFFKKDDVRTDKNGEIIWKKDEHISNIKKVLSYPQVNIVKKVEEQTGGFSKESILPKGNSDKLIPRKTKKFYWDTKKYGGFDSPIVAYSILVIADIEKGKSKKLKTVKALVGVTIMEKMTFERDPVAFLERKGYRNVQEENIIKLPKYSLFKLENGRKRLLASARELQKGNEIVLPNHLGTLLYHAKNIHKVDEPKHLDYVDKHKDEFKELLDVVSNFSKKYTLAEGNLEKIKELYAQNNGEDLKELASSFINLLTFTAIGAPATFKFFDKNIDRKRYTSTTEILNATLIHQSITGLYETRIDLSKLGGD

SEQ ID NO: 499 - protein, 1345 aa, Streptococcus mutans
  Streptococcus mutans M21
MKKPYSIGLDIGTNSVGWAVVTDDYKVPAKKMKVLGNTDKSHIKKNLLGALLFDSGNTAEDRRLKRTARRRYTRRRNRILYLQEIFSEEMGKVDDSFFHRLEDSFLVTEDKRGERHPIFGNLEEEVKYHENFPTIYHLRQYLADNPEKTDLRLVYLALAHIIKFRGHFLIEGKFDTRNNDVQRLFQEFLAVYDNTFENSSLQEQNVQVEEILTDKISKSAKKDRVLKLFPNEKSNGRFAEFLKLIVGNQADFKKHFELEEKAPLQFSKDIYEEELEVLLAQIGDNYAELFLSAKKLYDSILLSGILTVTDVSTKAPLSASMIQRYNEHQMDLAQLKQFIRQKLSDKYNEVFSDVSKDGYAGYIDGKTNQEAFYKYLKGLLNKIEGSGYFLDKIEREDFLRKQRTFDNGSIPHQIHLQEMRAIIRRQAEFYPFLADNQDRIEKILTFRIPYYVGPLARGKSDFAWLSRKSADKITPWNFDEIVDKESSVEAFINRMTNYDLYLPNQKVLPKHSLLYEKFTVYNELTKVKYKTEQGKTAFFDANMKQEIFDGVFKVYRKVTKDKLMDFLEKEFDEFRIVDLTGLDKENKAFNASYGTYHDLRKILDKDFLDNSKNEKILEDIVLTLTLFEDREMIRKRLKNYSDLLTKEQLKKLERRHYTGWGRLSAELIHGIRNKESRKTILDYLIDDGNSNRNFMQLINDDALSFKEEIAKAQVIGETDNLNQVVSDIAGSPAIKKGILQSLKIVDELVKIMGHQPENIVVEMARENQFTNQGRRNSQQRLKGLTDSIKEFGSQILKEHPVENSQLQNDRLFLYYLQNGRDMYTGEELDIDYLSQYDIDHIIPQAFIKDNSIDNRVLTSSKENRGKSDDVPSKNVVRKMKSYWSKLLSAKLITQRKFDNLTKAERGGLTDDDKAGFIKRQLVETRQITKHVARILDERFHTETDENNKKIRQVKIVTLKSNLVSNFRKEFELYKVREINDYHHAHDAYLNAVIGKALLGVYPQLEPEFVYGDYPHFHGHKENKATAKKFFYSNIMNFFKKDDVRTDKNGEIIWKKDEHISNIKKVLSYPQVNIVKKVEEQTGGFSKESILPKGNSDKLIPRKTKKFYWDTKKYGGFDSPIVAYSILVIADIEKGKSKKLKTVKALVGVTIMEKMTFERDPVAFLERKGYRNVQEENIIKLPKYSLFKLENGRKRLLASARELQKGNEIVLPNHLGTLLYHAKNIHKVDEPKHLDYVDKHKDEFKELLDVVSNFSKKYTLAEGNLEKIKELYAQNNGEDLKELASSFINLLTFTAIGAPATFKFFDKNIDRKRYTSTTEILNATLIHQSITGLYETRIDLSKLGGD

SEQ ID NO: 500 - protein, 1345 aa, Streptococcus mutans; identical to SEQ ID NO: 499
  Streptococcus mutans M21

SEQ ID NO: 501 - protein, 1345 aa, Streptococcus mutans
  Streptococcus mutans M230
MKKPYSIGLDIGTNSVGWAVVTDDYKVPAKKMKVLGNTDKSHIKKNLLGALLFDSGNTAEDRRLKRTARRRYTRRRNRILYLQEIFSEEMGKVDDSFFHRLEDSFLVTEDKRGERHPIFGNLEEEVKYHENFPTIYHLRQYLADNPEKVDLRLVYLALAHIIKFRGHFLIEGKFDTRNNDVQRLFQEFLAVYDNTFENSSLQEQNVQVEEILTDKISKSAKKDRVLKLFPNEKSNGRFAEFLKLIVGNQADFKKHFELEEKAPLQFSKDTYEEELEVLLAQIGDNYAELFLSAKKLYDSILLSGILTVTDVSTKAPLSASMIQRYNEHQMDLAQLKQFIRQKLSDKYNEVFSDVSKDGYAGYIDGKTNQEAFYKYLKGLLNKIEGSGYFLDKIEREDFLRKQRTFDNGSIPHQIHLQEMRAIIRRQAEFYPFLADNQDRIEKILTFRIPYYVGPLARGKSDFAWLSRKSADKITPWNFDEIVDKESSAEAFINRMTNYDLYLPNQKVLPKHSLLYEKFTVYNELTKVKYKTEQGKTAFFDANMKQEIFDGVFKVYRKVTKDKLMDFLEKEFDEFRIVDLTGLDKENKVFNASYGTYHDLCKILDKDFLDNSKNEKILEDIVLTLTLFEDREMIRKRLENYSDLLTKEQVKKLERRHYTGWGRLSAELIHGIRNKESRKTILDYLIDDGNSNRNFMQLINDDALSFKEEIAKAQVIGETDNLNQVVSDIAGSPAIKKGILQSLKIVDELVKIMGHQPENIVVEMARENQFTNQGRQNSQQRLKGLTDSIKEFGSQILKEHPVENSQLQNDRLFLYYLQNGRDMYTGEELDIDYLSQYDIDHIIPQAFIKDNSIDNRVLTSSKENRGKSDDVPSEDVVRKMKSYWSKLLSAKLITQRKFDNLTKAERGGLTDDDKAGFIKRQLVETRQITKHVARILDERFYTETDENNKKIRQVKIVTLKSNLVSNFRKEFELYKVREINDYHHAHDAYLNAVIGKALLGVYPQLEPEFVYGDYPHFHGHKENKATAKKFFYSNIMNFFKKDDVRTDKNGEIIWKKDEHISNIKKVLSYPQVNIVKKVEEQTGGFSKESILPKGNSDKLIPRKTKKFYWDTKKYGGFDSPIVAYSILVIADIEKGKSKKLKTVKALVGVTIMEKMTFERDPVAFLERKGYRNVQEENIIKLPKYSLFKLENGRKRLLASARELQKGNEIVLPNHLGTLLYHAKNIHKVDEPKHLDYVDKHKDEFKELLDVVSNFSKKYTLAEGNLEKIKELYAQNNGEDLKELASSFINLLTFTAIGAPATFKFFDKNIDRKRYTSTTEILNATLIHQSITGLYETRIDLSKLGGD

SEQ ID NO: 502 - protein, 1345 aa, Streptococcus mutans; identical to SEQ ID NO: 501
  Streptococcus mutans M230

SEQ ID NO: 503 - protein, 1345 aa, Streptococcus mutans
  Streptococcus mutans M2A
MKKPYSIGLDIGTNSVGWAVVTDDYKVPAKKMKVLGNTDKSHIKKNLLGALLFDSGNTAEDRRLKRTARRRYTRRRNRILYLQEIFSEEMGKVDDSFFHRLEDSFLVTEDKRGERHPIFGNLEEEVKYHENFPTIYHLRQYLADNPEKTDLRLVYLALAHIIKFRGHFLIEGKFDTRNNDVQRLFQEFLAVYDNTFENSSLQEQNVQVEEILTDKISKSAKKDRVLKLFPNEKSNGRFAEFLKLIVGNQADFKKHFELEEKAPLQFSKDIYEEELEVLLAQIGDNYAELFLSAKKLYDSILLSGILTVTDVSTKAPLSASMIQRYNEHQMDLAQLKQFIRQKLSDKYNEVFSDVSKDGYAGYIDGKTNQEAFYKYLKGLLNKIEGSGYFLDKIEREDFLRKQRTFDNGSIPHQIHLQEMRAIIRRQAEFYPFLADNQDRIEKILTFRIPYYVGPLARGKSDFAWLSRKSADKITPWNFDEIVDKESSVEAFINRMTNYDLYLPNQKVLPKHSLLYEKFTVYNELTKVKYKTEQGKTAFFDANMKQEIFDGVFKVYRKVTKDKLMDFLEKEFDEFRIVDLTGLDKENKAFNASYGTYHDLRKILDKDFLDNSKNEKILEDIVLTLTLFEDREMIRKRLKNYSDLLTKEQLKKLERRHYTGWGRLSAELIHGIRNKESRKTILDYLIDDGNSNRNFMQLINDDALSFKEEIAKAQVIGETDNLNQVVSDIAGSPAIKKGILQSLKIVDELVKIMGHQPENIVVEMARENQFTNQGRRNSQQRLKGLTDSIKEFGSQILKEHPVENSQLQNDRLFLYYLQNGRDMYTGEELDIDYLSQYDIDHIIPQAFIKDNSIDNRVLTSSKENRGKSDDVPSKDVVRKMKSYWSKLLSAKLITQRKFDNLTKAERGGLTDDDKAGFIKRQLVETRQITKHVARILDERFNTETDENNKKIRQVKIVTLKSNLVSNFRKEFELYKVREINDYHHAHDAYLNAVIGKALLGVYPQLEPEFVYGDYPHFHGHKENKATAKKFFYSNIMNFFKKDDVRTDKNGEIIWKKDEHISNIKKVLSYPQVNIVKKVEEQTGGFSKESILPKGNSYKLIPRKTKKFYWDTKKYGGFDSPIVAYSILVIADIEKGKSKKLKTVKALVGVTIMEKMTFERDPVAFLERKGYRNVQEENIIKLPKYSLFKLENGRKRLLASARELQKGNEIVLPNHLGTLLYHAKNIHKVDEPKHLDYVDKHKDEFKELLDVVSNFSKKYTLAEGNLEKIKELYAQNNGEDLKELASSFINLLTFTAIGAPAAFKFFDKNIDRKRYTSTTEILNATLIHQSITGLYETRIDLSKLGGD

SEQ ID NO: 504 - protein, 1345 aa, Streptococcus mutans; identical to SEQ ID NO: 503
  Streptococcus mutans M2A

SEQ ID NO: 505 - protein, 1345 aa, Streptococcus mutans
  Streptococcus mutans N29
MKKPYSIGLDIGTNSVGWAVVTDDYKVPAKKMKVLGNTDKSHIKKNLLGALLFDSGNTAADRRLKRTARRRYTRRRNRILYLQEIFAEEMSKVDDSFFHRLEDSFLVTEDKRGERHPIFGNLEEEVKYHENFPTIYHLRQYLADNPEKVDLRLVYLALAHIIKFRGHFLIEGKFDTRNNDVQRLFQEFLAVYDNTFENSSLQEQNVQVEEILTDKISKSAKKDRVLKLFPNEKSNGRFAEFLKLIVGNQADFKKHFELEEKAPLQFSKDTYEEELEVLLAQIGDNYAELFLSAKKLYDSILLSGILTVTDVSTKAPLSASMIQRYNEHQMDLAQLKQFIRQKLSDKYNEVFSDVSKDGYAGYIDGKTNQEAFYKYLKGLLNKIEGSGYFLDKIEREDFLRKQRTFDNGSIPHQIHLQEMRAIIRRQAEFYPFLADNQDRIEKILTFRIPYYVGPLARGKSDFAWLSRKSADKITPWNFDEIVDKESSAEAFINRMTNYDLYLPNQKVLPKHSLLYEKFTVYNELTKVKYKTEQGKTAFFDANMKQEIFDGVFKVYRKVTKDKLMDFLEKEFDEFRIVDLTGLDKENKAFNASYGTYHDLRKILDKDFLDNSKNEKILEDIVLTLTLFEDREMIRKRLENYSDLLTKEQVKKLERRHYTGWGRLSAELIHGIRNKESRKTILDYLIDDGNSNRNFMQLINDDALSFKEEIAKAQVIGETDNLNQVVSDIAGSPAIKKGILQSLKIVDELVKIMGHQPENIVVEMARENQFTNQGRRNSQQRLKGLTDSIKEFGSQILKEHPVENSQLQNDRLFLYYLQNGRDMYTGEELDIDYLSQYDIDHIIPQAFIKDNSIDNRVLTSSKENRGKSDDVPSKNVVRKMKSYWSKLLSAKLITQRKFDNLTKAERGGLTDDDKAGFIKRQLVETRQITKHVARILDERFHTETDENNKKIRQVKIVTLKSNLVSNFRKEFELYKVREINDYHHAHDAYLNAVIGKALLGVYPQLEPEFVYGDYPHFHGHKENKATAKKFFYSNIMNFFKKDDVRTDKNGEIIWKKDEHISNIKKVLSYPQVNIVKKVEEQTGGFSKESILPKGNSDKLIPRKTKKFYWDTKKYGGFDSPIVAYSILVIADIEKGKSKKLKTVKALVGVTIMEKMTFERDPVAFLERKGYRNVQEENIIKLPKYSLFKLENGRKRLLASARELQKGNEIVLPNHLGTLLYHAKNIHKVDEPKHLDYVDKHKDEFKELLDVVSNFSKKYTLAEGNLEKIKELYAQNNGEDLKELSSSFINLLTFTAIGAPAAFKFFDKNIDRKRYTSTTEILNATLIHQSITGLYETRIDLSKLGGD

SEQ ID NO: 506 - protein, 1345 aa, Streptococcus mutans; identical to SEQ ID NO: 505
  Streptococcus mutans N29

SEQ ID NO: 507 - protein, 1345 aa, Streptococcus mutans
  Streptococcus mutans N3209
MKKPYSIGLDIGTNSVGWAVVTDDYKVPAKKMKVLGNTDKSHIKKNLLGALLFDSGNTAEDRRLKRTTRRRYTRRRNRILYLQEIFSEEMGKVDDSFFHRLEDSFLVTEDKRGERHPIFGNLEEEVKYHENFPTIYHLRQYLADNPEKTDLRLVYLALAHIIKFRGHFLIEGKFDTRNNDVQRLFQEFLAVYDNTFENSSLQEQNVQVEEILTDKISKSAKKDRVLKLFPNEKSNGCFAEFLKLIVGNQADFKKHFELEEKAPLQFSKDTYEEELEVLLAQIGDNYAELFLSAKKLYDSILLSGILTVTDVSTKAPLSASMIQRYNEHQMDLTQLKQFIRQKLSDKYNEVFSDVSKDGYAGYIDGKTNQEAFYKYLKGLLNKIEGSGYFLDKIEREDFLRKQRTFDNGSIPHQIHLQEMRAIIRRQAEFYPFLADNQDRIEKLLTFRIPYYVGPLASGKSDFAWLSRKSADKITPWNFDEIVDKESSAEAFINRMTNYDLYLPNQKVLPKHSLLYEKFTVYNELTKVKYKTEQGKTAFFDANMKQEIFDGVFKVYRKVTKDKLMDFLEKEFDEFRIVDLTGLDKENKVFNASYGTYHDLCKILDKDFLDNSKNEKILEDIVLTLTLFEDREMIRKRLENYSDLLTKEQVKKLERRHYTGWGRLSAELIHGIRNKESRKTILDYLIDDGNSNRNFMQLINDDALSFKEEIAKAQVIGETDNLNQVVSDIAGSPAIKKGILQSLKIVDELVKIMGHQPENIVVEMARENQFTNQGRRNSQQRLKGLTDSIKEFGSQILKEHPVENSQLQNDRLFLYYLQNGRDMYTGEELDIDYLSQYDIDHIIPQAFIKDNSIDNRVLTSSKENRGKSDDVPSKDVVRKMKSYWSKLLSAKLITQRKFDNLTKAERGGLTDDDKAGFIKRQLVETRQITKHVARILDERFNTETDENNKKIRQVKIVTLKSNLVSNFRKEFELYKVREINDYHHAHDAYLNAVIGKALLGVYPQLEPEFVYGDYPHFHGHKENKATAKKFFYSNIMNFFKKDDVRTDKNGEIIWKKDEHISNIKKVLSYPQVNIVKKVEEQTGGFSKESILPKGNSDKLIPRKTKKFYWDTKKYGGFDSPIVAYSILVIADIEKGKSKKLKTVKALVGVTIMEKMTFERDPVAFLERKGYRNVQEENIIKLPKYSLFKLENGRKRLLASARELQKGNEIVLPNHLGTLLYHAKNIHKVDEPKHLDYVDKHKDEFKELLDVVSNFSKKYTLAEGNLEKIKELYAQNNGEDLKELASSFINLLTFTAIGAPATFKFFDKNIDRKRYTSTTEILNATLIHQSITGLYETRIDLSKLGGD

SEQ ID NO: 508 - protein, 1345 aa, Streptococcus mutans; identical to SEQ ID NO: 507
  Streptococcus mutans N3209

SEQ ID NO: 509 - protein, 1345 aa, Streptococcus mutans
  Streptococcus mutans N66
MKKPYSIGLDIGTNSVGWAVVTDDYKVPAKKMKVLGNTDKSHIKKNLLGALLFDSGNTAEDRRLKRTARRRYTRRRNRILYLQEIFSEEMGKVDDSFFHRLEDSFLVTEDKRGERHPIFGNLEEEVKYHENFPTIYHLRQYLADNPEKTDLRLVYLALAHIIKFRGHFLIEGKFDTRNNDVQRLFQEFLAVYDNTFENSSLQEQNVQVEEILTDKISKSAKKDRVLKLFPNEKSNGRFAEFLKLIVGNQADFKKHFELEEKAPLQFSKDIYEEELEVLLAQIGDNYAELFLSAKKLYDSILLSGILTVTDVSTKAPLSASMIQRYNEHQMDLAQLKQFIRQKLSDKYNEVFSDVSKDGYAGYIDGKTNQEAFYKYLKGLLNKIEGSGYFLDKIEREDFLRKQRTFDNGSIPHQIHLQEMRAIIRRQAEFYPFLADNQDRIEKILTFRIPYYVGPLARGKSDFAWLSRKSADKITPWNFDEIVDKESSAEAFINRMTNYDLYLPNQKVLPKHSLLYEKFTVYNELTKVKYKTEQGKTAFFDANMKQEIFDGVFKVYRKVTKDKLMDFLEKEFDEFRIVDLTGLDKENKAFNASYGTYHDLRKILDKDFLDNSKNEKILEDIVLTLTLFEDREMIRKRLKNYSDLLTKEQLKKLERRHYTGWGRLSAELIHGIRNKESRKTILDYLIDDGNSNRNFMQLINDDALSFKEEIAKAQVIGETDNLNQVVSDIAGSLAIKKGILQSLKIVDELVKIMGHQPENIVVEMARENQFTNQGRRNSQQRLKGLTDSIKEFGSQILKEHPVENSQLQNDRLFLYYLQNGRDMYTGEELDIDYLSQYDIDHIIPQAFIKDNSIDNRVLTSSKENRGKSDDVPSKDVVRKMKSYWSKLLSAKLITQRKFDNLTKGERGGLTDDDKAGFIKRQLVETRQITKHVARILDERFNTETDENNKKIRQVKIVTLKSNLVSNFRKEFELYKVREINDYHHAHDAYLNAVIGKALLGVYPQLEPEFVYGDYPHFHGHKENKATAKKFFYSNIMNFFKKDDVRTDKNGEIIWKKDEYISNIKKVLSYPQVNIVKKVEEQTGGFFKESILPKGDSDKLIPRKTKKFYWDTKKYGGFDSPIVAYSILVIADIEKGKSKKLKTVKALVGVTIMEKMTFERDPVAFLERKGYRNVQEENIIKLPKYSLFKLENGRKRLLASARELQKGNEIVLPNHLGTLLYHAKNIHKVDEPKHLDYVDKHKDEFKELLDVVSNFSKKYTLAEGNLEKIKELYAQNNGEDLKELASSFINLLTFTAIGAPATFKFFDKNIDRKRYTSTTEILNATLIHQSITGLYETRIDLSKLGGD

SEQ ID NO: 510 - protein, 1345 aa, Streptococcus mutans; identical to SEQ ID NO: 509
  Streptococcus mutans N66

SEQ ID NO: 511 - protein, 1350 aa, Streptococcus mutans
  Streptococcus mutans NFSM1
MKKPYSIGLDIGTNSVGWAVVTDDYKVPAKKMTVLGNTDKSHIKKNLLGALLFDSGNTAADRRLKRTARRRYTRRRNRILYLQEIFAEEMSKVDDSFFHRLEDSFLVTEDKRGERHPIFGNLEEEVKYHENFPTIYHLRQYLADNPEKVDLRLVYLALAHIIKFRGHFLIEGKFDTRNNDVQRLFQEFLAVYDNTFENSSLQEQNVQVEEILTDKISKSAKKDRVLKLFPNEKSNGRFAEFLKLIVGNQADFKKHFELEEKTPLQFSKDTYEEELEVLLAQIGDNYAELFLSAKKLYDSILLSGILTVTDVSTKAPLSASMIQRYNEHQMDLAQLKQFIRQKLSDKYNEVFSDVSKDGYAGYIDGKTNQEAFYKYLKGLLNKIEGSGYFLDKIEREDFLRKQRTFDNGSIPHQIHLQEMRAIIRRQAEFYPFLADNQDRIEKILTFRIPYYVGPLARGKSDFAWLSRKSADKITPWNFDEIVDKESSAEAFINRMTNYDLYLPNQKVLPKHSLLYEKFTVYNELTKVKYKTEQGKTAFFDANMKQEIFDGVFKVYRKVTKDKLMDFLEKEFDEFRIVDLTGLDKENKAFNASYGTYHDLRKILDKDFLDNSKNEKILEDIVLTLTLFEDREMIRKRLENYSDLLTKEQVKKLERRHYTGWGRLSAELIHGIRNKESRKTILDYLIDDGNSNRNFMQLINDDALSFKEEIAKAQVIGETDNLNQVVSDIAGSPAIKKGILQSLKIVDELVKIMGHQPENIVVEMARENQFTNQGRRNSQQRLKGLTDSIKEFGSQILKEHPVENSQLQNDRLFLYYLQNGRDMYTGEELDIDYLSQYDIDHIIPQAFIKDNSIDNRVLTSSKENRGKSDDVPSEDVVNRMRPFWNKLLSSGLISQRKYNNLTKKELTPDDKAGFIKRQLVETRQITKHVARMLDERFNKEFDDNNKRIRRVKIVTLKSNLVSSFRKEFELYKVREINDYHHAHDAYLNAVVVKALLVKYPKLEPEFVYGEYPKYNSYRERKTATQKMFFYSNIMNMFKSKVKLADDQIVERPMIEVNDETGEIAWDKTKHITTVKKVLSYPQVNIVKKVEEQTIGQNGGLFDDNPKSPLEVIPSKLVPLKKALNPEKYGGYQKPTTAYPILLIVDTKQLIPISVMDKKRFEQNPVKFLKDKGYQQIEKNNFVKLPKYTLVDIGNGIKRLWASSKEVHKGNQLVVSKKSQDLLYHAHHLDNDYSNEYVKNHYQQFDILFNEITSFSKKCKLGKEHIQKIEEAYSKERDSASIEELADGFIKLLGFTQLGATSPFSFLGIKLNQKQYTGKKDYLLPCMEATLIHQSITGLYETRIDLSKLGGD

SEQ ID NO: 512 - protein, 1350 aa, Streptococcus mutans; identical to SEQ ID NO: 511
  Streptococcus mutans NFSM1

SEQ ID NO: 513 - protein, 1345 aa, Streptococcus mutans; identical to SEQ ID NO: 485
  Streptococcus mutans NLML1

SEQ ID NO: 514 - protein, 1338 aa, Streptococcus mutans
  Streptococcus mutans NLML4
MDLIGTNSVGWAVVTDDYKVPAKKMKVLGNTDKSHIKKNLLGALLFDSGNTAADRRLKRTARRRYTRRRNRILYLQEIFAEEMSKVDDSFFHRLEDSFLVTEDKRGERHPIFGNLEEEVKYHENFPTIYHLRQYLADNPEKVDLRLVYLALAHIIKFRGHFLIEGKFDTRNNDVQRLFQEFLAVYDNTFENSSLQEQNVQVEEILTDKISKSAKKDRVLKLFPNEKSNGRFAEFLKLIVGNQADFKKHFELEEKAPLQFSKDTYEEELEVLLAQIGDNYAELFLSAKKLYDSILLSGILTVTDVSTKAPLSASMIQRYNEHQMDLAQLKQFIRQKLSDKYNEVFSDVSKDGYAGYIDGKTNQEAFYKYLKGLLNKIEGSGYFLDKIEREDFLRKQRTFDNGSIPHQIHLQEMRAIIRRQAEFYPFLADNQDRIEKILTFRIPYYVGPLARGKSDFAWLSRKSADKITPWNFDEIVDKESSAEAFINRMTNYDLYLPNQKVLPKHSLLYEKFTVYNELTKVKYKTEQGKTAFFDANMKQEIFDGVFKVYRKVTKDKLMDFLEKEFDEFRIVDLTGLDKENKAFNASYGTYHDLRKILDKDFLDNSKNEKILEDIVLTLTLFEDREMIRKRLENYSDLLTKEQVKKLERRHYTGWGRLSAELIHGIRNKESRKTILDYLIDDGNSNRNFMQLINDDALSFKEEIAKAQVIGETDNLNQVVSDIAGSPAIKKGILQSLKIVDELVKIMGHQPENIVVEMARENQFTNQGRRNSQQRLKGLTDSIKEFGSQILKEHPVEHSQLQNDRLFLYYLQNGRDMYTGEELDIDYLSQYDIDHIIPQAFIKDNSIDNRVLTSSKENRGKSDDVPSKNVVRKMKSYWSKLLSAKLITQRKFDNLTKAERGGLTDDDKAGFIKRQLVETRQITKHVARILDERFHTETDENNKKIRQVKIVTLKSNLVSNFRKEFELYKVREINDYHHAHDAYLNAVIGKALLGVYPQLEPEFVYGDYPHFHGHKENKATAKKFFYSNIMNFFKKDDVRTDKNGEIIWKKDEHISNIKKVLSYPQVNIVKKVEEQTGGFSKESILPKGNSDKLIPRKTKKFYWDTKKYGGFDSPIVAYSILVIADIEKGKSKKLKTVKALVGVTIMEKMTFERDPVAFLERKGYRNVQEENIIKLPKYSLFKLENGRKRLLASARELQKGNEIVLPNHLGTLLYHAKNIHKVDEPKHLDYVDKHKDEFKELLDVVSNFSKKYTLAEGNLEKIKELYAQNNGEDLKELASSFINLLTFTAIGAPATFKFFDKNIDRKRYTSTTEILNATLIHQSITGLYETRIDLSKLGGD

SEQ ID NO: 515 - protein, 1338 aa, Streptococcus mutans; identical to SEQ ID NO: 514
  Streptococcus mutans NLML4

SEQ ID NO: 516 - protein, 1128 aa, Streptococcus mutans
  Streptococcus mutans NLML5
MANSKILGLDIGIASVGVGIIDKETGKIIHVNSRIFPAATADSNVERRGFRQGRRLVRRKKHRKVRLADLFLDSNLLTDFSKVSLNLNPYQLRVKGLNEELSNEELFIALKSIVSRRGISYLDDASEDSGANSSEYGKAVEENRKLLEDRTPGQIQLERFEKYGKVRGDFTVVENGENHRLINVFSTSAYKKEAERILRRQQEFNIRIADEFIEAYLTILTGKRKYYHGPGNEKSRTDYGRFRTDGTTLDNIFGILIGKCTFYPDEYRAAKASYTAQEFNLLNDLNNLTVPTETKKLSEEQKRQIIEHAKTVKTLGAPTLLKYIAKLVGCSADDIKGYRIDKSDKPEIHTFEAYRKMRTMELIKVADLSRESLDALAHILTLNTEREGIEEAIRDRFTNKEFNQEQINELVLFRKNNSSLFGKGWHNFSLKLMKELIPELYETSEEQMTILTRLGKQRVKKSSNRTNYIDEKELTEEIYNPVVAKSVRQAIKIINLATKKYGVFDNIVIEMARESNEDDEKKAIQNAQKANEDEKEAALLKAAHQFNGKEELPDSIFHGHKELLTKIRLWHQQGEKCLYTGKTIFINDLIHNPYKYEIDHILPLSLSFDDSLANKVLVLSTANQEKGQRTPFQSLDSMDGAWTYREFKAYVKGLKTLSNKKKDYLLNEEDINKNEVKQKFIERNLVDTRYSSRVVLNTLQDFYKKREFDTKISVVRGQFTSQIRRKWRIEKTRETYHHHAVDALIIAASSQLNLWKKQNNPLISYKEDQFVDPETGEILSLSDDEYKELVFKAPYDHFVDTLKSKKFEDSILFSYQVDSKYNRKISDATIYGTRKARLGKDSQEETYVLGKIKDIYSQKGYEDFIKKYKKDKTQFLMYHKDPQTFEKVIEEILKTYSDKELNEKGKEVPCNPFEKYRQENGPVRKYSKKGNGPEIKSIKYYDNKLGNHIDITPNNSHHQVVLQSLKPWRTDVYFNPKSGKYELMGLKYSDLRFEKVSGDYGISVKKYNEIKSKEGVDENSEFKFTLYKNDLILIKDTESGEQELFRFLSRTMPNQKHYVELKPYDKSKFEGHQKLMDIFGEVAKGGQCLKGLNKSNISIYKVKTDVLGNKYFIKKEGDQPQLNFKKKI

SEQ ID NO: 517 - protein, 1128 aa, Streptococcus mutans; identical to SEQ ID NO: 516
  Streptococcus mutans NLML5

SEQ ID NO: 518 - protein, 1125 aa, Streptococcus mutans
  Streptococcus mutans NLML8
MTNGKILGLDIGIASVGVGIINAKTGNVEHASSRIFPAANADNNVERRSARGGRRLIRRKKHRLKRVEDLFEKYNIDTDFSNLNLNPYQLRVKGLNEQLSNEELFAILKNIAKRRGISYLDDAEDDSVGSSDYAKAIDENRKLLKKQTPGEIQLKRLEKYGQLRGNFTIQDENGEYHRLINVFSTSDYVKEARRILETQSYYNKFITESFVEDYIKILQGKRKYYVGPGNEKSRTDYGIYRTDGETLDNLFGILIGKCGFYPEEYRAAKASYTAQEYNFLNDLNNLTVPTETKKLSTEQKYQLVDFAKTASTLEAAKLLKEIAKLVGCQVEEIKGYRLDNKDKPDLHTFEPFRKLKSNLTTIAVENLSITTLDTLAHILTLNTEREGIEEAIQKELPNIFSDEQITGIIAVRKKNSQIFGKGWHSFSIKLMKELIPELYETSEEQMTILIRLKKVKTNSKITNRTKYINEQEVTDEIYNPVVSKSIRQTVKIINAAIKKYGAFDQIVIEMPRESNEEDERKFIADLQKSNAKEKDDAMKQAALLYNGKAELPHGVFHGHKELATKIRLWYQQGERCLYSGKHIDIHDLIHNQHMFEIDHVLPLSLSFDDSLANKVLVYSWANQEKGQRTPFQALPQMASAWSFRELRDYISKQKGISKKKRDYLLTEQDINKVEVKQKFIERNLVDTRYVSRVVLNTLQDALKVMNKETKISVIRGQFTSQLRRQWRIDKSRETYHHHAVDALIIAASSQLRLWKKQNNPMFAEDKHGQKINLDTGEVLSDDAYKELVYQAPYQGFVNTISSKSFEDEILFSYQVDSKVNRKISDATIYATRQAQLGKDKKEETYVLGKIKDIYSQAGYDAFRKKYDKDKAVFLMYQKDPETWEKVIEVILRDYKELDDKGKEIGNPFERYKVKHGFVRKYSRKNKGTEIKSLKYYDNKLGNHIDITPNNSKHSVVLQSINPWRADLYFNPETTKYELMGLKYADLSFEKGTGKYSISREKYDEIKEREGISSKSEFKFTLYKNDLILVKDIGNHKELIARFNSKNDTSKHYVELKPWNKAKFDSEEELIPAFGKVAKSGQFIKGLNKPDLSIYKVKTDILGHKYYIKKEGDKPKLNFENKIKNK

SEQ ID NO: 519 - protein, 1125 aa, Streptococcus mutans; identical to SEQ ID NO: 518
  Streptococcus mutans NLML8

SEQ ID NO: 520 - protein, 1345 aa, Streptococcus mutans
  Streptococcus mutans NLML9
MKKPYSIGLDIGTNSVGWAVVTDDYKVSAKKMKVLGNTDKSHIKKNLLGALLFDSGNTAEDRRLKRTARRRYTRRRNRILYLQEIFAEEMSKVDDSFFHRLEDSFLVTEDKRGERHPIFGNLEEEVKYHENFPTIYHLRQYLADNPEKVDLRLVYLALAHIIKFRGHFLIEGKFDTRNNDVQRLFQEFLAVYDNTFENSSLQEQNVQVEEILTDKISKSAKKDRVLKLFPNEKSNGRFAEFLKLIVGNQADFKKHFELEEKAPLQFSKDTYEEELEVLLAQIGDNYAELFLSAKKLYDSILLSGILTVTDVSTKAPLSASMIQRYNEHQMDLAQLKQFIRQKLSDKYNEVFSDVSKDGYAGYIDGKTNQEAFYKYLKGLLNKIEGSGYFLDKIEREDFLRKQRTFDNGSIPHQIHLQEMRAIIRRQAEFYPFLADNQDRIEKILTFRIPYYVGPLARGKSDFAWLSRKSADKITPWNFDEIVDKESSAEAFINRMTNYDLYLPNQKVLPKHSLLYEKFTVYNELTKVKYKTEQGKTAFFDANMKQEIFDGVFKVYRKVTKDKLMDFLEKEFDEFRIVDLTGLDKENKAFNASYGTYHDLRKILDKDFLDNSKNEKILEDIVLTLTLFEDREMIRKRLENYSDLLTKEQVKKLERRHYTGWGRLSAELIHGIRNKESRKTILDYLIDDGNSNRNFMQLINDDALSFKEEIAKAQVIGETDNLNQVVSDIAGSPAIKKGILQSLKIVDELVKIMGHQPENIVVEMARENQFTNQGRRNSQQRLKGLTDSIKEFGSQILKEHPVEHSQLQNDRLFLYYLQNGRDMYTGEELDIDYLSQYDIDHIIPQAFIKDNSIDNRVLTSSKENRGKSDDVPSKNVVRKMKSYWSKLLSAKLITQRKFDNLTKAERGGLTDDDKAGFIKRQLVETRQITKHVARILDERFHTETDENNKKIRQVKIVTLKSNLVSNFRKEFELYKVREINDYHHTHDAYLNAVIGKALLGVYPQLEPEFVYGDYPHFHGHKENKATAKKFFYSNIMNFFKKDDVRTDKNGEIIWKKDEHISNIKKVLSYPQVNIVKKVEEQTGGFSKESILPKGNSDKLIPRKTKKFYWDTKKYGGFDSPIVAYSILVIADIEKGKSKKLKTVKALVGVTIMEKMTFERDPVAFLERKGYRNVQEENIIKLPKYSLFKLENGRKRLLASARELQKGNEIVLPNHLGTLLYHAKNIHKVDEPKHLDYVDKHKDEFKELLDVVSNFSKKYTLAEGNLEKIKELYAQNNGEDLKELASSFINLLTFTAIGAPATFKFFDKNIDRKRYTSTTEILNATLIHQSITGLYETRIDLSKLGGD

SEQ ID NO: 521 - protein, 1345 aa, Streptococcus mutans; identical to SEQ ID NO: 520
  Streptococcus mutans NLML9

SEQ ID NO: 522 - protein, 1355 aa, Streptococcus mutans
  Streptococcus mutans NMT4863
MKKPYSIGLDIGTNSVGWAVVTDDYKVPAKKMKVLGNTDKSHIKKNLLGALLFDSGNTAEDRRLKRTARRRYTRRRNRILYLQEIFAEEMSKVDDSFFHRLDESFLTDDDKNFDSHPIFGNKAEEDAYHQKFPTIYHLRKHLADSTEKADLRLVYLALAHMIKFRGHFLIEGELNAENTDVQKLFADFVGVYDRTFDDSHLSEITVDASSILTEKISKSRRLEKLINNYPKEKKNTLFGNLIALSLGLQPNFKTNFKLSEDAKLQFSKDTYEEDLEELLGKIGDDYADLFTLAKNLYDAILLSGILTADDSSTKAPLSASMIKRYAEHHEDLEKLKEFIKANKPELYHDIFKDETKNGYAGYIENGVKQDEFYKYLKNTLSKITGSDYFLDQIEREDFLRKQRTFDNGSIPHQIHLQEMHAILRRQGDYYPFLKENQDRIEKILTFRIPYYVGPLARKNSRFAWAEYHSDEAVTPWNFDQVIDKESSAQAFIEHMTNNDLYLPNEKVLPKHSPLYEKYTVYNELTKIKYVTEIGEAKFFDANLKQEIFDGLFKHERKVTKKKLRTFLDKNFDEFRIVDIQGLDKETETFNASYATYQDLLKVIKDKVFMDNPENAEILENIVLTLTLFEDREMIKQRLAKYADVFDKKVIDQLARRHYTGWGRLSAKLLNGIRDKQSCKTIMDYLIDDAQSNRNLMQLITDDNLTFKDDIVKAQYVDNSDDLHQVVQSLAGSPAIKKGILQSLKIVDELVKVMGKEPEQIVVEMARENQTTAKGRRNSQQRYKRLKEAIKSLDRDLNHKILKEHPTDNQALQNNRLFLYYLQNGRDMYTGESLDINRLSDYDIDHVIPQAFIKDNSIDNRVLTSSKANRGKSDDVPSEDVVNRMRPFWNKLLSSGLISQRKYNNLTKKELTLDDKAGFIKRQLVETRQITKHVARMLDERFNKEFDDNNKRIRRVKIVTLKSNLVSSFRKEFELYKVREINDYHHAHDAYLNAVVVKALLVKYPKLEPEFVYGEYPKYNSYRERKTATQKMFFYSNIMNMFKSKVKLADDQIVERPMIEVNDETGEIAWDKTKHITTVKKVLSYPQVNIVKKVEEQTIGQNGGLFDDNPKSPLEVIPSKLVPLKKALNPEKYGGYQKPTTAYPILLIVDTKQLIPISVMDKKRFEQNPVKFLKDKGYQQIEKNNFVKLPKYTLVDIGNGIKRLWASSKEVHKGNQLVVSKKSQDLLYHAHHLDNDYSNEYVKNHYQQFDILFNEITSFSKKCKLGKEHIQKIEEAYSKERDFASIEELADGFIKLLGFTQLGATSPFSFLGIKLNQKQYTGKKDYLLPCMEATLIHQSITGLYETRIDLSKLGGD

SEQ ID NO: 523 - protein, 1355 aa, Streptococcus mutans; identical to SEQ ID NO: 522
  Streptococcus mutans NMT4863

SEQ ID NO: 524 - protein, 1345 aa, Streptococcus mutans
MKKPYSIGLDIGTNSVGWAVVTDDYKVPAKKMKVLGNTDKSHIKKNLLGALLFDSGNTAADRRLKRTARRRYTRRRNRILYLQEIFAEEMSKVDDSFFHRLEDSFLVTEDKRGERHPIFGNLEEEVKYHENFPTIYHLRQYLADNPEKVDLRLVYLALAHIIKFRGHFLIEGKFDTRNNDVQRLFQEFLAVYDNTFENSSLQEQNVQVEEILTDKISKSAKKDRVLKLFPNEKSNGRFAEFLKLIVGNQADFKKHFELEEKAPLQFSKDTYEEELEVLLAQIGDNYAELFLSAKKLYDSILLSGILTVTDVSTKAPLSASMIQRYNEHQMDLAQLKQFIRQKLSDKYNEVFSDVSKDGYAGYIDGKTNQEAFYKYLKGLLNKIEGSGYFLDKIEREDFLRKQRTFDNGSIPHQIHLQEMRAIIRRQAEFYPFLADNQDRIEKILTFRIPYYVGPLARGKSDFAWLSRKSADKITPWNFDEIVDKESSAEAFINRMTNYDLYLPNQKVLPKHSLLYEKFTVYNELTKVKYKTEQGKTAFFDANMKQEIFDGVFKVYRKVTKDKLMDFLEKEFDEFRIVDLTGLDKENKAFNASYGTYHDLRKILDKDFLDNSKNEKILEDIVLTLTLFEDREMIRKRLENYSDLLTKEQVKKLERRHYTGWGRLSAELIHGIRNKESRKTILDYLIDDGNSNRNFMQLINDDALSFKEEIAKAQVIGETDNLNQVVSDIAGSPAIKKGILQSLKIVDELVKIMGHQPENIVVEMARENQFTNQGRRNSQQRLKGLTDSIKEFGSQILKEHPVKHSQLQNDRLFLYYLQNGRDMYTGEELDIDYLSQYDIDHIIPQAFIKDNSIDNRVLTSSKENRGKSDDVPSKNVVRKMKSYWSKLLSAKLITQRKFDNLTKAERGGLTDDDKAGFIKRQLVETRQITKHVARILDERFHTETDENNKKIRQVKIVTLKSNLVSNFRKEFELYKVREINDYHHAHDAYLNAVIGKALLGVYPQLEPEFVYGDYPHFHGHKENKATAKKFFYSNIMNFFKKDDVRTDKNGEIIWKKDEHISNIKKVLSYPQVNIVKKVEEQTGGFSKESILPKGNSDKLIPRKTKKFYWDTKKYGGFDSPIVAYSILVIADIEKGKSKKLKTVKALVGVTIMEKMTFERDPVAFLERKGYRNVQEENIIKLPKYSLFKLENGRKRLLASARELQKGNEIVLPNHLGTLLYHAKNIHKVDEPKHLDYVDKHKDEFKELLDVVSNFSKKYTLAEGNLEKIKELYAQNNGEDLKELASSFINLLTFTAIGAPATFKFFDKNIDRKRYTSTTEILNATLIHQSITGLYETRIDLSKLGGD

SEQ ID NO: 525 - protein, 1345 aa, Streptococcus mutans; identical to SEQ ID NO: 471
  Streptococcus mutans NV1996

SEQ ID NO: 526 - protein, 1345 aa, Streptococcus mutans
  Streptococcus mutans NVAB
MKKPYSIGLDIGTNSVGWAVVTDDYKVPAKKMKVLGNTDKSHIKKNLLGALLFDSGNTAADRRLKRTARRRYTRRRNRILYLQEIFAEEMSKVDDSFFHRLEDSFLVTEDKRGERHPIFGNLEEEVKYHENFPTIYHLRQYLADNPEKVDLRLVYLALAHIIKFRGHFLIEGKFDTRNNDVQRLFQEFLAVYDNTFENSSLQEQNVQVEEILTDKISKSAKKDRVLKLFPNEKSNGRFAEFLKLIVGNQADFKKHFELEEKAPLQFSKDTYEEELEVLLAQIGDNYAELFLSAKKLYDSILLSGILTVTDVSTKAPLSASMIQRYNEHQMDLAQLKQFIRQKLSDKYNEVFSDVSKDGYAGYIDGKTNQEAFYKYLKGLLNKIEGSGYFLDKIEREDFLRKQRTFDNGSIPHQIHLQEMRAIIRRQAEFYPFLADNQDRIEKILTFRIPYYVGPLARGKSDFAWLSRKSADKITPWNFDEIVDKESSAEAFINRMTNYDLYLPNQKVLPKHSLLYEKFTVYNELTKVKYKTEQGKTAFFDANMKQEIFDGVFKVYRKVTKDKLMDFLEKEFDEFRIVDLTGLDKENKVFNASYGTYHDLCKILDKDFLDNSKNEKILEDIVLTLTLFEDREMIRKRLENYSDLLTKEQVKKLERRHYTGWGRLSAELIHGIRNKESRKTILDYLIDDGNSNRNFMQLINDDALSFKEEIAKAQVIGETDNLNQVVSDIAGSPAIKKGILQSLKIVDELVKIMGHQPENIVVEMARENQFTKQGRRNSQQRLKGLTDSIKEFGSQILKEHPVENSQLQNDRLFLYYLQNGRDMYTGEELDIDYLSQYDIDHIIPQAFIKDNSIDNRVLTSSKENRGKSDDVPSKDVVRKMKSYWSKLLSAKLITQRKFDNLTKAERGGLTDDDKAGFIKRQLVETRQITKHVARILDERFYTETDENNKKIRQVKIVTLKSNLVSNFRKEFELYKVREINDYHHAHDAYLNAVIGKALLGVYPQLEPEFVYGDYPHFHGHKENKATAKKFFYSNIMNFFKKDDVRTDKNGEIIWKKDEHISNIKKVLSYPQVNIVKKVEEQTGGFSKESILPKGNSDKLIPRKTKKFYWDTKKYGGFDSPIVAYSILVIADIEKGKSKKLKTVKALVGVTIMEKMTFERDPVAFLERKGYRNVQEENIIKLPKYSLFKLENGRKRLLASARELQKGNEIVLPNHLGTLLYHAKNIHKVDEPKHLDYVDKHKDEFKELLDVVSNFSKKYTLAEGNLEKIKELYAQNNGEDLKELASSFINLLTFTAIGAPATFKFFDKNIDRKRYTSTTEILNATLIHQSITGLYETRIDLSKLGGD

SEQ ID NO: 527 - protein, 1345 aa, Streptococcus mutans; identical to SEQ ID NO: 526
  Streptococcus mutans NVAB

SEQ ID NO: 528 - protein, 1345 aa, Streptococcus mutans
  Streptococcus mutans R221
MKKPYSIGLDIGTNSVGWAVVTDDYKVPAKKMKVLGNTDKSHIKKNLLGALLFDSGNTAEDRRLKRTARRRYTRRRNRILYLQEIFSEEMGKVDDSFFHRLEDSFLVTEDKRGERHPIFGNLEEEVKYHENFPTIYHLRQYLADNPEKTDLRLVYLALAHIIKFRGHFLIEGKFDTRNNDVQRLFQEFLAVYDNTFENSSLQEQNVQVEEILTDKISKSAKKDRVLKLFPNEKSNGRFAEFLKLIVGNQADFKKHFELEEKAPLQFSKDIYEEELEVLLAQIGDNYAELFLSAKKLYDSILLSGILTVTDVSTKAPLSASMIQRYNEHQMDLAQLKQFIRQKLSDKYNEVFSDVSKDGYAGYIDGKTNQEAFYKYLKGLLNKIEGSGYFLDKIEREDFLRKQRTFDNGSIPHQIHLQEMRAIIRRQAEFYPFLADNQDRIEKILTFRIPYYVGPLARGKSDFAWLSRKSADKITPWNFDEIVDKESSVEAFINRMTNYDLYLPNQKVLPKHSLLYEKFTVYNELTKVKYKTEQGKTAFFDANMKQEIFDGVFKVYRKVTKDKLMDFLEKEFDEFRIVDLTGLDKENKAFNASYGTYHDLRKILDKDFLDNSKNEKILEDIVLTLTLFEDREMIRKRLKNYSDLLTKEQLKKLERRHYTGWGRLSAELIHGIRNKESRKTILDYLIDDGNSNRNFMQLINDDALSFKEEIAKAQVIGETDNLNQVVSDIAGSPAIKKGILQSLKIVDELVKIMGHQPENIVVEMARENQFTNQGRRNSQQRLKGLTDSIKEFGSQILKEHPVENSQLQNDRLFLYYLQNGRDMYTGEELDIDYLSQYDIDHIIPQAFIKDNSIDNRVLTSSKENRGKSDDVPSKDVVRKMKSYWSKLLSAKLITQRKFDNLTKAERGGLTDDDKAGFIKRQLVETRQITKHVARILDERFNTETDENNKKIRQVKIVTLKSNLVSNFRKEFELYKVREINDYHHAHDAYLNAVIGKALLGVYPQLEPEFVYGDYPHFHGHKENKATAKKFFYSNIMNFFKKDDVRTDKNGEIIWKKDEHISNIKKVLSYPQVNIVKKVEEQTGGFSKESILPKGNSDKLIPRKTKKFYWDTKKYGGFDSPIVAYSILVIADIEKGKSKKLKTVKALVGVTIMEKMTFERDPVAFLERKGYRNVQEENIIKLPKYSLFKLENGRKRLLASARELQKGNEIVLPNHLGTLLYHAKNIHKVDEPKHLDYVDKHKDEFKELLDVVSNFSKKYTLAEGNLEKIKELYAQNNGEDLKELASSFINLLTFTAIGAPATFKFFDKNIDRKRYTSTTEILNATLIHQSITGLYETRIDLNKLGGD

SEQ ID NO: 529 - protein, 1345 aa, Streptococcus mutans; identical to SEQ ID NO: 528
  Streptococcus mutans R221

SEQ ID NO: 530 - protein, 1345 aa, Streptococcus mutans
  Streptococcus mutans S1B
MKKPYSIGLDIGTNSVGWAVVTDDYKVPAKKMKVLGNTDKSHIKKNLLGALLFDSGNTAEDRRLKRTARRRYTRRRNRILYLQEIFSEEMGKVDDSFFHRLDESFLTDDDKNFDSYPIFGNKAEEDAYHQKFPTIYHLRKHLADSTEKADLRLVYLALAHMIKFRGHFLIEGELNAENTDVQKLFADFVGVYDRTFDDSHLSEITVDASSILTEKISKSRRLEKLINNYPKEKKNTLFRNLVALSLGLQPNFKTNFKLSEDAKLQFSKDTYEEDLEELLGKIGDDYADLFTLAKNLYDAILLSGILTADDSSTKAPLSASMIKRYAEHHEDLEKLKEFIKANKPELYHDIFKDETKNGYAGYIENGVKQDEFYKYLKNTLSKIAGSDYFLDKIEREDFLRKQRTFDNGSIPHQIHLQEMHAILRRQGDYYPFLKENQDRIEKILTFRIPYYVGPLARGKSDFAWLSRKSADKITPWNFDEIVDKESSVEAFINRMTNYDLYLPNQKVLPKHSLLYEKFTVYNELTKVKYKTEQGKTAFFDANMKQEIFDGVFKVYRKVTKDKLMDFLEKEFDEFRIVDLTGLDKENKAFNASYGTYHDLRKILDKDFLDNSKNEKILEDIVLTLTLFEDREMIRKRLKNYSDLLTKEQLKKLERRHYTGWGRLSAELIHGIRNKESRKTILDYLIDDGNSNRNFMQLINDDALSFKEEIAKAQVIGETDNLNQVVSDIAGSPAIKKGILQSLKIVDELVKIMGHQPENIVVEMARENQFTNQGRRNSQQRLKGLTDSIKEFGSQILKEHPVENSQLQNDRLFLYYLQNGRDMYTGEELDIDYLSQYDIDHIIPQAFIKDNSIDNRVLTSSKENRGKSDDVPSKDVVRKMKSYWSKLLSAKLITQRKFDNLTKGERGGLTDDDKAGFIKRQLVETRQITKHVARILDERFNTETDENNKKIRQVKIVTLKSNLVSNFRKEFELYKVREINDYHHAHDAYLNAVIGKALLGVYPQLEPEFVYGDYPHFHGHKENKATAKKFFYSNIMNFFKKDDVRTDKNGEIIWKKDEYISNIKKVLSYPQVNIVKKVEEQTGGFSKESILPKGDSDKLIPRKTKKFYWDTKKYGGFDSPIVAYSILVIADIEKGKSKKLKTVKALVGVTIMEKMTFERDPVAFLERKGYRNVQEENIIKLPKYSLFKLENGRKRLLASARELQKGNEIVLPNHLGTLLYHAKNIHKVDEPKHLDYVDKHKDEFKELLDVVSNFSKKYTLAEGNLEKIKELYAQNNGEDLKELASSFINLLTFTAIGAPATFKFFDKNIDRKRYTSTTEILNATLIHQSITGLYETRIDLSKLGGD

SEQ ID NO: 531 - protein, 1345 aa, Streptococcus mutans; identical to SEQ ID NO: 530
  Streptococcus mutans S1B

SEQ ID NO: 532 - protein, 1345 aa, Streptococcus mutans; identical to SEQ ID NO: 471
  Streptococcus mutans SF1

SEQ ID NO: 533 - protein, 1345 aa, Streptococcus mutans
  Streptococcus mutans SF14
MKKPYSIGLDIGTNSVGWAVVTDDYKVPAKKMKVLGNTDKSHIKKNLLGALLFDSGNTAEDRRLKRTARRRYTRRRNRILYLQEIFSEEMGKVNDSFFHRLEDSFLVTEDKRGERHPIFGNLEEEVKYHENFPTIYHLRQYLADNPEKVDLRLVYLALAHIIKFRGHFLIEGKFDTRNNDVQRLFQEFLAVYDNTFENSSLQEQNVQVEEILTDKISKSAKKDRVLKLFPNEKSNGRFAEFLKLIVGNQADFKKHFELEEKAPLQFSKDTYEEELEVLLAQIGDNYAELFLSAKKLYDSILLSGILTVTDVSTKAPLSASMIQRYNEHQMDLAQLKQFIRQKLSDKYNEVFSDVSKDGYAGYIDGKTNQEAFYKYLKGLLNKIEGSGYFLDKIEREDFLRKQRTFDNGSIPHQIHLQEMRAIIRRQAEFYPFLADNQDRIEKILTFRIPYYVGPLARGKSDFAWLSRKSADKITPWNFDEIVDKESSAEAFINRMTNYDLYLPNQKVLPKHSLLYEKFTVYNELTKVKYKTEQGKTAFFDANMKQEIFDGVFKVYRKVTKDKLMDFLEKEFDEFRIVDLTGLDKENKVFNASYGTYHDLCKILDKDFLDNSKNEKILEDIVLTLTLFEDREMIRKRLENYSDLLTKEQVKKLERRHYTGWGRLSAELIHGIRNKESRKTILDYLIDDGNSNRNFMQLINDDALSFKEEIAKAQVIGETDNLNQVVSDIAGSPAIKKGILQSLKIVDELVKIMGHQPENIVVEMARENQFTKQGRRNSQQRLKGLTDSIKEFGSQILKEHPVENSQLQNDRLFLYYLQNGRDMYTGEELDIDYLSQYDIDHIIPQAFIKDNSIDNRVLTSSKENRGKSDDVPSKDVVRKMKSYWSKLLSAKLITQRKFDNLTKAERGGLTDDDKAGFIKRQLVETRQITKHVARILDERFYTETDENNKKIRQVKIVTLKSNLVSNFRKEFELYKVREINDYHHAHDAYLNAVIGKALLGVYPQLEPEFVYGDYPHFHGHKENKATAKKFFYSNIMNFFKKDDVRTDKNGEIIWKKDEYISNIKKVLSYPQVNIVKKVEEQTGGFSKESILPKGNSDKLIPRKTKKFYWDTKKYGGFDSPIVAYSILVIADIEKGKSKKLKTVKALVGVTIMEKMTFERDPIAFLERKGYRNVQEENIIKLPKYSLFKLENGRKRLLASARELQKGNEIVLPNHLGTLLYHAKNIHKVDEPKHLDYVDKHKDEFKELLDVVSNFSKKYTLAEGNLEKIKELYAQNNGEDLKELASSFINLLTFTAIGAPAAFKFFDKNIDRKRYTSTTEILNATLIHQSITGLYETRIDLSKLGGD

SEQ ID NO: 534 - protein, 1345 aa, Streptococcus mutans; identical to SEQ ID NO: 533
  Streptococcus mutans SF14

SEQ ID NO: 535 - protein, 1345 aa, Streptococcus mutans
  Streptococcus mutans SM1
MKKPYSIGLDIGTNSVGWAVVTDDYKVPAKKMKVLGNTDKSHIKKNLLGALLFDSGNTAEDRRLKRTARRRYTRRRNRILYLQEIFSEEMGKVDDSFFHRLEDSFLVTEDKRGERHPIFGNLEEEVKYHENFPTIYHLRQYLADNPEKVDLRLVYLALAHIIKFRGHFLIEGKFDTRNNDVQKLFQEFLAVYDNTFENSSLQEQNVQVEEILTDKISKSAKKDRVLKLFPNEKSNGRFAEFLKLIVGNQADFKKHFELEEKAPLQLSKDTYEEELEVLLAQIGDNYAELFLSAKKLYDSILLSGILTVTDVSTKAPLSASMIQRYNEHQMDLAQLKQFIRQKLSDKYNEVFSDVSKDGYAGYIDGKTNQEAFYKYLKGLLNKIEGSGYFLDKIEREDFLRKQRTFDNGSIPHQIHLQEMRAIIRRQAEFYPFLADNQDRIEKILTFRIPYYVGPLARGKSDFAWLSRKSADKITPWNFDEIVDKESSVEAFINRMTNYDLYLPNQKVLPKHSLLYEKFTVYNELTKVKYKTEQGKTAFFDANMKQEIFDGVFKVYRKVTKDKLMDFLEKEFDEFRIVDLTGLDKENKAFNASYGTYHDLRKILDKDFLDNSKNEKILEDIVLTLTLFEDREMIRKRLENYSDLLTKEQVKKLERRHYTGWGRLSAELIHGIRNKESRKTLLDYLIDDGNSNRNFMQLINDDALSFKEEIAKAQVIGETDNLNQVVSDIAGSPAIKKGILQSLKIVDELVKIMGHQPENIVVEMARENQFTNQGRRNSQQRLKGLTDSIKEFGSQILKEHPVENSQLQNDRLFLYYLQNGRDMYTGEELDIDYLSQYDIDHIIPQAFIKDNSIDNRVLTSSKENRGKSDDVPSKDVVRKMKSYWSKLLSAKLITQRKFDNLTKAERGGLTDDDKAGFIKRQLVETRQITKHVARILDERFNTETDENNKKIRQVKIVTLKSNLVSNFRKEFELYKVREINDYHHAHDAYLNAVIGKALLGVYPQLEPEFVYGDYPHFHGHKENKATAKKFFYSNIMNFFKKDDVRTDKNGEIIWKKDEYISNIKKVLSYPQVNIVKKVEEQTGGFSKESILPKGNSDKLIPRKTKKFYWDTKKYGGFDSPIVAYSILVIADIEKGKSKKLKTVKALVGVTIMEKMTFERDPIAFLERKGYRNVQEENIIKLPKYSLFKLENGRKRLLASARELQKGNEIVLPNHLGTLLYHAKNIHKVDEPKHLDYVDKHKDEFKELLDVVSNFSKKYTLAEGNLEKIKELYAQNNGEDLKELASSFINLLTFTAIGAPATFKFFDKNIDRKRYTSTTEILNATLIHQSITGLYETRIDLSKLGGD

SEQ ID NO: 536 - protein, 1345 aa, Streptococcus mutans; identical to SEQ ID NO: 535
  Streptococcus mutans SM1

SEQ ID NO: 537 - protein, 1345 aa, Streptococcus mutans
  Streptococcus mutans SM4
MKKPYSIGLDIGTNSVGWAVVTDDYKVPAKKMKVLGNTDKSHIKKNLLGALLFDSGNTAEDRRLKRTARRRYTRRRNRILYLQEIFSEEMDKVDDSFFHRLEDSFLVTEDKRGERHPIFGNLEEEVKYHENFPTIYHLRQYLADNPEKVDLRLVYLALAHIIKFRGHFLIEGKFDTRNNDVQRLFQEFLAVYDNTFENSSLQEQNVQVEEILTDKISKSAKKDRVLKLFPNEKSNGRFAEFLKLIVGNQADFKKHFELEEKAPLQFSKDTYEEELEVLLAQIGDNYAELFLSAKKLYDSILLSGILTVTDVSTKAPLSASMIQRYNEHQMDLAQLKQFIRQKLSDKYNEVFSDVSKDGYAGYIDGKTNQEAFYKYLKGLLNKIEGSGYFLDKIEREDFLRKQRTFDNGSIPHQIHLQEMRAIIRRQAEFYPFLADNQDRIEKILTFRIPYYVGPLARGKSDFAWLSRKSADKITPWNFDEIVDKESSAEAFINRMTNYDLYLPNQKVLPKHSLLYEKFTVYNELTKVKYKTEQGKTAFFDANMKQEIFDGVFKVYRKVTKDKLMDFLEKEFDEFRIVDLTGLDKENKVFNASYGTYHDLCKILDKDFLDNSKNEKILEDIVLTLTLFEDREMIRKRLENYSDLLTKEQVKKLERRHYTGWGRLSAELIHGIRNKESRKTILDYLIDDGNSNRNFMQLINDDALSFKEEIAKAQVIGETDNLNQVVSDIAGSPAIKKGILQSLKIVDELVKIMGHQPENIVVEMARENQFTKQGRRNSQQRLKGLTDSIKEFGSQILKEHPVENSQLQNDRLFLYYLQNGRDMYTGEELDIDYLSQYDIDHIIPQAFIKDNSIDNRVLTSSKENRGKSDDVPSKDVVRKMKSYWSKLLSAKLITQRKFDNLTKAERGGLTDDDKAGFIKRQLVETRQITKHVARILDERFYTETDENNKKIRQVKIVTLKSNLVSNFRKEFELYKVREINDYHHAHDAYLNAVIGKALLGVYPQLEPEFVYGDYPHFHGHKENKATAKKFFYSNIMNFFKKDDVRTDKNGEIIWKKDEHISNIKKVLSYPQVNIVKKVEEQTGGFSKESILPKGNSDKLIPRKTKKFYWDTKKYGGFDSPIVAYSILVIADIEKGKSKKLKTVKALVGVTIMEKMTFERDPVAFLERKGYRNVQEENIIKLPKYSLFKLENGRKRLLASARELQKGNEIVLPNHLGTLLYHAKNIHKVDEPKHLDYVDKHKDEFKELLDVVSNFSKKYTLAEGNLEKIKELYAQNNGEDLKELASSFINLLTFTAIGAPATFKFFDKNIDRKRYTSTTEILNATLIHQSITGLYETRIDLSKLGGD

SEQ ID NO: 538 - protein, 1345 aa, Streptococcus mutans; identical to SEQ ID NO: 537
  Streptococcus mutans SM4

SEQ ID NO: 539 - protein, 1345 aa, Streptococcus mutans
  Streptococcus mutans SM6
MKKPYSIGLDIGTNSVGWAVVTDDYKVPAKKMKVLGNTDKSHIKKNLLGALLFDSGNTAEDRRLKRTARRRYTRRRNRILYLQEIFSEEMGKVDDSFFHRLEDSFLVTEDKRGERHPIFGNLEEEVKYHENFPTIYHLRQYLADNPEKTDLRLVYLALAHIIKFGGHFLIEGKFDTRNNDVQRLFQEFLAVYDNTFENSSLQEQNVQVEEILTDKISKSAKKDRVLKLFPNEKSNGRFAEFLKLIVGNQADFKKHFELEEKAPLQFSKDIYEEELEVLLAQIGDNYAELFLSAKKLYDSILLSGILTVTDVSTKAPLSASMIQRYNEHQMDLAQLKQFIRQKLSDKYNEVFSDVSKDGYAGYIDGKTNQEAFYKYLKGLLNKIEGSGYFLDKIEREDFLRKQRTFDNGSIPHQIHLQEMRAIIRRQAEFYPFLADNQDRIEKILTFRIPYYVGPLARGKSDFAWLSRKSADKITPWNFDEIVDKESSVEAFINRMTNYDLYLPNQKVLPKHSLLYEKFTVYNELTKVKYKTEQGKTAFFDANMKQEIFDGVFKVYRKVTKDKLMDFLEKEFDEFRIVDLTGLDKENKAFNASYGTYHDLRKILDKDFLDNSKNEKILEDIVLTLTLFEDREMIRKRLKNYSDLLTKEQLKKLERRHYTGWGRLSAELIHGIRNKESRKTILDYLIDDGNSNRNFMQLINDDALSFKEEIAKAQVIGETDNLNQVVSDIAGSPAIKKGILQSLKIVDELVKIMGHQPENIVVEMARENQFTNQGRRNSQQRLKGLTDSIKEFGSQILKEHPVENSQLQNDRLFLYYLQNGRDMYTGEELDIDYLSQYDIDHIIPQAFIKDNSIDNRVLTSSKENRGKSDDVPSKNVVRKMKSYWSKLLSAKLITQRKFDNLTKAERGGLTDDDKAGFIKRQLVETRQITKHVARILDERFHTETDENNKKIRQVKIVTLKSNLVSNFRKEFELYKVREINDYHHAHDAYLNAVIGKALLGVYPQLEPEFVYGDYPHFHGHKENKATAKKFFYSNIMNFFKKDDVRTDKNGEIIWKKDEHISNIKKVLSYPQVNIVKKVEEQTGGFSKESILPKGNSDKLIPRKTKKFYWDTKKYGGFDSPIVAYSILVIADIEKGKSKKLKTVKALVGVTIMEKMTFERDPVAFLERKGYRNVQEENIIKLPKYSLFKLENGRKRLLASARELQKGNEIVLPNHLGTLLYHAKNIHKVDEPKHLDYVDKHKDEFKELLDVVSNFSKKYTLAEGNLEKIKELYAQNNGEDLKELASSFINLLTFTAIGAPATFKFFDKNIDRKRYTSTTEILNATLIHQSITGLYETRIDLSKLGGD

SEQ ID NO: 540 - protein, 1345 aa, Streptococcus mutans; identical to SEQ ID NO: 539
  Streptococcus mutans SM6

SEQ ID NO: 541 - protein, 1134 aa, Streptococcus mutans
  Streptococcus mutans ST1
MANGKILGLDIGIASVGVGIIDKETGKIIHVNSRIFPAATADSNVERRGFRQGRRLVRRKKHRKVRLADLFLDSNLLTDFSKVSLNLNPYQLRVKGLNEELSNEELFIALKSIVSRRGISYLDDASEDSGANSSEYGKAVEENRKLLEDRTPGQIQLERFEKYGKVRGDFTVVENGENHRLINVFSTSAYKKEAERILRRQQEFNMRIADEFIEAYLTILTGKRKYYHGPGNEKSRTDYGRFRTDGTTLDNIFGILIGKCTFYPDEYRAAKASYTAQEFNLLNDLNNLTVPTETKKLSEEQKRQIIEHAKTVKTLGAPTLLKYIVKLVGCSADDIKGYRIDKSDKPEIHTFEAYRKMRTMELIKVDDLSRESLDALAHILTLNTEREGIEEAIRDRFTNKEFNQEQINELVLFRKNNSSLFGKGWHNFSLKLMKELIPELYETSEEQMTILTRLGKQRVKKSSNRTNYIDEKELTEEIYNPVVAKSVRQAIKIINLATKKYGVFDNIVIEMARESNEDDEKKAIQNAQKANEDEKKAALLKAAHQFNGKEELPDSIFHGHKELLTKIRLWHQQGEKCLYTGKTIFINDLIHNPYKYEIDHILPLSLSFDDSLANKVLVLSTANQEKGQRTPFQSLDSMDGAWTYREFKSYVKGLKTLSNKKKDYLLTEENIDKIEVKQKFIERNLVDTRYSSRVVLNALQDFYKERKFDTKISVVRGQFTSQLRRKWRIEKTRETYHHHAVDALIIAASSQLNLWKKQNNPLISYKEDQFVDPETGEILSLSDDEYKKLVFKAPYEHFVDTLKSKKFEDSILFSYQVDSKYNRKISGATICGTRKAQLGKDTQEETYVLGKIKDIYSQKGYEDFIKKYKKDKTQFLMYHKDPQTFEKVIEEILKTYPDKELNEKGKEVSCNPFEKYRQENGPVRKYSKKGNGPEIKSLKYYDEVLGKNIDITPKNSLNKVVLRSLNPWRTDVYFNHETRKYEFLGLKYSDLRYLKGEHRYGILIGDYKKIKDKEGIEKESEFKFTLYKNDLILIKDTAKGKEELFRFWSRTGKDNAKTFEKNKIELKPYSKSQFEKGEDTNVLGKLYASSNQLQKSFGTLENLSIYKVRTDVLGNKYFIKKEGDKPQLNFKKKL

SEQ ID NO: 542 - protein, 1134 aa, Streptococcus mutans; identical to SEQ ID NO: 541
  Streptococcus mutans ST1

SEQ ID NO: 543 - protein, 1350 aa, Streptococcus mutans
  Streptococcus mutans ST6
MKKPYSIGLDIGTNSVGWAVVTDDYKVPAKKMKVLGNTDKSHIEKNLLGALLFDSGNTAEDRRLKRTARRRYTRRRNRILYLQEIFSEEMGKVDDSFFHRLEDSFLVTEDKRGERHPIFGNLEEEVKYHENFPTIYHLRQYLADNPEKVDLRLVYLALAHIIKFRGHFLIEGKFDTRNNDVQRLFQEFLAVYDNTFENSSLQEQNVQVEEILTDKISKSAKKDRVLKLFPNEKSNGRFAEFLKLIVGNQADFKKHFELEEKAPLQFSKDTYEEELEVLLAQIGDNYAELFLSAKKLYDSILLSGILTVTDVSTKAPLSASMIQRYNEHQMDLTQLKQFIRQKLSDKYNEVFSDVSKDGYAGYIDGKTNQEAFYKYLKGLLNKIEGSGYFLDKIEREDFLRKQRTFDNGSIPHQIHLQEMRAIIRRQAEFYSFLADNQDRIEKILTFRIPYYVGPLARGKSDFAWLSRKSADKITPWNFDEIVDKESSAEAFINRMTNYDLYLPNQKVLPKHSLLYEKFTVYNELTKVKYKTEQGKTAFFDANMKQEIFDGVFKVYRKVTKDKLMDFLEKEFDEFRIVDLTGLDKENKAFNASYGTYHDLRKILDKDFLDNSKNEKILEDIVLTLTLFEDREMIRKRLENYSDLLTKEQVKKLERRHYTGWGRLSAELIHGIRNKESRKTILDYLIDDGNSNRNFMQLINDDALSFKEEIAKAQVIGETDNLNQVVSDIAGSPAIKKGILQSLKIVDELVKIMGHQPENIVVEMARENQFTNQGRRNSQQRLKGLTDSIKEFGSQILKEHPVENSQLQNDRLFLYYLQNGRDMYTGEELDIDYLSQYDIDHIIPQAFIKDNSIDNRVLTSSKENRGKSDDVPSEDVVNRMRPFWNKLLSSGLISQRKYNNLTKKELTLDDKAGFIKRQLVETRQITKHVARMLDERFNKEFDDNNKRIRKVKIVTLKSNLVSSFRKEFELYKVREINDYHHAHDAYLNAVVVKALLVKYSKLEPEFVYGEYPKYNSYRERKTATQKMFFYSNIMNMFKSKVKLADDQIVERPMIEVNDETGEIAWDKTKHITTVKKVLSYPQVNIVKKVEEQTIGQNGGLFDDNPKSPLEVIPSKLVPLKKALNPEKYGGYQKPTTAYPILLIVDTKQLIPISVMDKKRFEQNPVKFLKDKGYQQIEKNNFVKLPKYTLVDIGNGIKRLWASSKEVHKGNQLVVSKKSQDLLYHAHHLDNDYSNEYVKNHYQQFDILFNEITSFSKKCKLGKEHIQKIEEAYSKERDSASIEELADGFIKLLGFTQLGATSPFSFLGIKLNQKQYTGKKDYLLPCMEATLIHQSITGLYETRIDLSKLGGD

SEQ ID NO: 544 - protein, 1350 aa, Streptococcus mutans; identical to SEQ ID NO: 543
  Streptococcus mutans ST6

SEQ ID NO: 545 - protein, 1125 aa, Streptococcus mutans
  Streptococcus mutans U2A
MTNGKILGLDIGIASVGVGIINAKTGNVEHASSRIFPAANADNNVERRSARGGRRLIRRKKHRLKRVEDLFEKYNIDTDFSNLNLNPYQLRVKGLNEQLSNEELFAILKNIAKRRGISYLDDAEDDSVGSSDYAKAIDENRKLLKKQTPGEIQLKRLEKYGQLRGNFTIQDENGEYHRLINVFSTSDYVKEARRILETQSYYNKFITESFVEDYIKILQGKRKYYVGPGNEKSRTDYGIYRTDGETLDNLFGILIGKCGFYPEEYRAAKASYTAQEYNFLNDLNNLTVPTETKKLSTEQKYQLVDFAKTASTLGAAKLLKEIAKLVGCQVEEIKGYRLDNKDKPDLHTFEPFRKLKSNLTTIAVENLSITTLDTLAHILTLNTEREGIEEAIQKELPNIFSDEQITEIIAVRKKNSQIFGKGWHSFSIKLMKELIPELYETSEEQMTILTRLKKVKTNSKITNRTKYINEEEITDEIYNPVVSKSIRQTVKIINATIKKYGAFDQIIIEMPRESNEEDERKFIADLQKSNAKEKDDAMKQAALLYNGKDELPHDVFHGHKELATKIRLWYQQGERCLYSGKHIDIHDLIHNQHMFEIDHVLPLSLSFDDSLANKVLVYSWANQEKGQRTPFQALPQMASAWSFRELRDYISKQKGISKKKRDYLLTEQDINKVEVKQKFIERNLVDTRYVSRVVLNTLQDALKVMNKETKISVIRGQFTSQLRRQWRIDKSRETYHHHAVDALIIAASSQLRLWKKQNNPMFAEDKHGQKINLDTGEVLSDDAYKELVYQAPYQGFVNTISSKSFEDEILFSYQVDSKVNRKISDATIYATRQAQLGKDKKEETYVLGKIKDIYSQAGYDAFRKKYDKDKAVFLMYQKDPETWEKVIEVILRDYKELDDKGKEIGNPFERYKVKHGFVRKYSRKNKGTEIKSLKYYDNKLGNHIDITPNNSKHSVVLQSINPWRADLYFNPETTKYELMGLKYADLSFEKGTGKYSISREKYDEIKEREGISSKSEFKFTLYKNDLILVKDIGNHKELIARFNSKNDTSKHYVELKPWNKAKFDSEEELIPAFGKVAKSGQFIKGLNKPDLSIYKVKTDILGHKYYIKKEGDKPKLNFENKIKNK

SEQ ID NO: 546 - protein, 1125 aa, Streptococcus mutans; identical to SEQ ID NO: 545
  Streptococcus mutans U2A

SEQ ID NO: 547 - protein, 1345 aa, Streptococcus mutans
  Streptococcus mutans UA159
MKKPYSIGLDIGTNSVGWAVVTDDYKVPAKKMKVLGNTDKSHIEKNLLGALLFDSGNTAEDRRLKRTARRRYTRRRNRILYLQEIFSEEMGKVDDSFFHRLEDSFLVTEDKRGERHPIFGNLEEEVKYHENFPTIYHLRQYLADNPEKVDLRLVYLALAHIIKFRGHFLIEGKFDTRNNDVQRLFQEFLAVYDNTFENSSLQEQNVQVEEILTDKISKSAKKDRVLKLFPNEKSNGRFAEFLKLIVGNQADFKKHFELEEKAPLQFSKDTYEEELEVLLAQIGDNYAELFLSAKKLYDSILLSGILTVTDVGTKAPLSASMIQRYNEHQMDLAQLKQFIRQKLSDKYNEVFSDVSKDGYAGYIDGKTNQEAFYKYLKGLLNKIEGSGYFLDKIEREDFLRKQRTFDNGSIPHQIHLQEMRAIIRRQAEFYPFLADNQDRIEKLLTFRIPYYVGPLARGKSDFAWLSRKSADKITPWNFDEIVDKESSAEAFINRMTNYDLYLPNQKVLPKHSLLYEKFTVYNELTKVKYKTEQGKTAFFDANMKQEIFDGVFKVYRKVTKDKLMDFLEKEFDEFRIVDLTGLDKENKVFNASYGTYHDLCKILDKDFLDNSKNEKILEDIVLTLTLFEDREMIRKRLENYSDLLTKEQVKKLERRHYTGWGRLSAELIHGIRNKESRKTILDYLIDDGNSNRNFMQLINDDALSFKEEIAKAQVIGETDNLNQVVSDIAGSPAIKKGILQSLKIVDELVKIMGHQPENIVVEMARENQFTNQGRRNSQQRLKGLTDSIKEFGSQILKEHPVENSQLQNDRLFLYYLQNGRDMYTGEELDIDYLSQYDIDHIIPQAFIKDNSIDNRVLTSSKENRGKSDDVPSKDVVRKMKSYWSKLLSAKLITQRKFDNLTKAERGGLTDDDKAGFIKRQLVETRQITKHVARILDERFNTETDENNKKIRQVKIVTLKSNLVSNFRKEFELYKVREINDYHHAHDAYLNAVIGKALLGVYPQLEPEFVYGDYPHFHGHKENKATAKKFFYSNIMNFFKKDDVRTDKNGEIIWKKDEHISNIKKVLSYPQVNIVKKVEEQTGGFSKESILPKGNSDKLIPRKTKKFYWDTKKYGGFDSPIVAYSILVIADIEKGKSKKLKTVKALVGVTIMEKMTFERDPVAFLERKGYRNVQEENIIKLPKYSLFKLENGRKRLLASARELQKGNEIVLPNHLGTLLYHAKNIHKVDEPKHLDYVDKHKDEFKELLDVVSNFSKKYTLAEGNLEKIKELYAQNNGEDLKELASSFINLLTFTAIGAPATFKFFDKNIDRKRYTSTTEILNATLIHQSITGLYETRIDLNKLGGD

SEQ ID NO: 548 - protein, 1345 aa, Streptococcus mutans; identical to SEQ ID NO: 472
  Streptococcus mutans W6

SEQ ID NO: 549 - protein, 1121 aa, Streptococcus oralis
  Streptococcus oralis SK1074
MNGLVLGLDIGIASVGVGILEKNSGKIIHANSRLFPAATADNNVERRKNRQARRLNRRKKHRGVRFQDLFEDYGLLTDFSKVSINLNPYRLRVDGLNQQLTNEELFIALKNIVKRRGISYLDDASEDGGAVSSDYGKAVEENRKLLAEQTPGQIQLERFEKYGQVRGDFTVVENGEKCRLINVFSTSAYRKEAEKILRKQQEFNNQITDEFIEDYLKILTGKRKYYHGPGNEKSRTDYGRFRTDGTTLDNIFGVLIGKCTFYPNEYRASKSSYTAQEFNLLNDLNNLTVPTETKKLSEEQKKVIVEYAKEAKTLGASTLLKYIVKMIDASVDQISGYRVDVNNKPEMHTFEVYRKMQSLETISVGELSRNVLDELAHILTLNTEREGIEEAINSKLMGVFSQDQVLELVQFRKNNSSLFSKGWHNFSLKLMMELIPELYETSEEQMTILTRLGKQKSKETSKRTKYIDEKELTEEIYNPVVAKSVRQAIKIINEATKKHGIFDNIVIEMARENNEEDAKKDYIKRQKANQDEKNAAMEKAAFQYNGKKELPGNIFNGHKELATKIRLWHQQGEKCLYTGKTIPISDLIHNQYKYEIDHILPLSLSFDDSLSNKVLVHATANQEKGQRTPFQALDSMDDAWSYREFKSYVKDLKSLSNKKKDYLLTEEDISKIEVKQKFIERNLVDTRYSSRVVLNALQDFYKSHQFDTTISVVRGQFTSQLRRKWGLEKSRETYHHHAVDALIIAASSQLRLWKKQNNPLITYKEGQFVDSQTGEIISLTDDEYKELVFKAPYDHFVDTLHSKTFEDGILFSYQVDSKYNRKISDATIYATRKAKLDKDKSEETYVLGKIKDIYSQAGYDAFIKIYNKDKRKFLMYHKDPQTFEKVIEEILRTYPSKERNDKNKEVPCNPFEKYRQENGPIRKYSKKGNGPEIKCLKYYDNKLGNYIDISPDGSDNQVVLQSLKPWRTDVYFNHQTKEYELMGLKYSDLSFEKGSGKYSISNEKYNSIKRIEGVNEQSEFKFTLYKNDLILIKDSENNEQKLFRFNSRNDTAKHYVELKPYDKARFDGQQELITILGNVAKGGQCLKGLNKSNISIFKVKTDVLGKKHIIKKEGDEPKLKF

SEQ ID NO: 550 - protein, 1373 aa, Streptococcus oralis
  Streptococcus oralis SK304
MENKNYSIGLDIGTNSVGWAVITDDYKVPSKKMKVLGNTDKRFIKKNLIGALLFDEGTTAEARRLKRTARRRYTRRKNRLRYLQEIFAEEMSKVDSSFFHRLDDSFLIPEDKKGSKYPIFATLIEEKEYHKQFPTIYHLRKQLADSKEKTDLRLIYLALAHMIKYRGHFLYEDTFDIKNNDIQKIFNEFISIYNNTFEGNSLSGQNVQVEAIFTDKISKSAKRERVLKLFPDEKSTGLFSEFLKLIVGNQADFKKHFDLEEKAPLQFSRDTYDEDLENLLGQIGDDFADLFVAAKKLYDAILLSGILTVTDPSTKAPLSASMIERYENHQKDLATLKQFIKTNLPEKYDEVFSDQSKDGYAGYIDGKTTQESFYKYIKNLLSKFEGADYFLEKIEREDFLRKQRTFDNGSIPHQIHLQEMNAILRRQGEHYPFLKENKEKIEKILTFRIPYYVGPLARGNRDFAWLTRNSDQAIRPWNFEEIVDKASSAESFINKMTNYDLYLPEEKVLPKHSLLYETFAVYNELTKVKFIAEGLRDYQFLDSRQKKDIFYTLFKAEDKRKVTEKDIIQYLHTVDGYDGIELKGIEKQFNASLSTYHDLLKIIKDKEFMDDPNNEEILENIVHTLTIFEDREMIKQRLAQYDSLFDEKVIKALTRRHYTGWGKLSSKLINGIRDKQTGKTILDYLMDDGYNNRNFMQLINDDELSFKEIIKKAQVVGKTDDVKQVVQELPGSPAIKKGILQSIKLVDELVKVMGHEPESIVIEMARENQTTARGKKNSQQRYKRIEDSLKILASGLNAKILKEHPTDNIQLQNDRLFLYYLQNGRDMYTGKPLDINQLSSYDIDHIVPQAFIKDDSLDNRVLTSLKDNRGKSDNVPSLEVVEKMKTFWQQLLDSKLISYRKFNNLTKAERGGLDERDKVGFIKRQLVETRQITKHVAQILDARYNTEVNEKDKKNRTVKIITLKSNLVSNFRKEFRLYKIREINDYHHAHDAYLNAVVAKAILKKYPKLEPEFVYGDYQKYDLKRYISRSKDPKEIEKATEKYFFYSNLLNFFKEEVHYADGTIVKRENIEYSKDTGEIAWNKEKDFATIKKVLSLPQVNIVKKREVQTGGFSKESILPKGNSDKLIPRKTKDILWDTTKYGGFDSPVIAYSILLIADIEKGKAKRLKTVKTLVGITIMEKATFEKSPIAFLENKGYHNVRKENILCLPKYSLFELKNGRRRMLASAKELQKGNEIVLPVHLTTLLYHAKNIHRLDEPEHLEYIQKHRNEFKGLLNLVSEFSQKYVLADANLEKIKNLYADNEQADIEILANSFINLLTFTALGAPAAFKFFGKDVDRKRYTTVSEILNATLIHQSITGLYETRIDLSKLGED

SEQ ID NO: 551 - protein, 1134 aa, Streptococcus oralis
  Streptococcus oralis SK313
MNGLVLGLDIGIASVGVGILEKNSGKIVHASSRIFPAATADNNVERRKNRQARRLHRRKKHRGARLKDLFEYYGLLTDFSKVSINLNPYRLRVDGLDQQLTNEELFIALKNIVKRRGISYLDDASEDGGTVSSDYGKAVEENRKLLAEQTPGQIQLERFEKYGQLRGDFTVVENSEKCRLINVFSTSAYKKEAERILRKQQEFNNQITDEFIEDYLKILTGKRKYYHGPGNEKSRTDYGRFRTDGATLDNIFGILIGKCTFYPNEYRASKASYTAQEFNLLNDLNNLTVPTETKKLSEEQKKTIIEYAKSAKTLGASTLLKYIAKMIDASVDQIRGYRVDVNNKPEMHTFEVYRKMQSLETISVGELSRNILDELAHILTLNTEREGIEEAINTKLRDSFSQDQVLELVQFRKNNSSLFSKGWHNFSLKLMMELIPELYETSEEQMTILTRLGKQKSKETSKRTKYIDEKEVTEEIYNPVVAKSVRQAIKIINEATKKHGIFDNIVIEMARENNEEDAKKDYIKRQKANQDEKYAAMEKAAFQYNGKKELPDNIFHGHKELATKIRLWHQQGEKCLYTGKSIPISDLIHNQYKYEIDHILPLSLSFDDSLSNKVLVLATANQEKGQRTPFQALDSMDDAWSYREFKSYVKESKLLGNKKKEYLLTEEDISKIEVKQKFIERNLVDTRYSSRVVLNALQDFYKNHNFDTTISVVRGQFTSQLRRKWGLEKSRETYHHHAVDALIIAASSQLRLWKKQNNPLIAYKEGQFVDSQTGEIISLTDDEYKELVFKAPYDHFVDTLSSKTFEDSILFSYQVDSKFNRKISDATIYATRKAKLDKEKKEYTYTLGKIKDIYSLGTKTPSKTGFYKFLDLYNKDKSQFLMFQKDRKTWDEVIEKIMEQYRPFKEYDKAGKLVDFNPFEKYRQENGPIRKYSKKGNGPEIKSLKYYDILLGKHKNITPEGSRNTVALLSLNPWRTDVYYNMETKKYEFLGLKYADLPFEEGGAYGISTETYNELREKEGIGKNSEFKFTLYKNDLILIKDTETNCQQFFRFWSRTGKDNPKSFEKHKIELKPYEKAKFEKGEELEVLGKVPPSSNQFQKNMQIENLSIYKVKTDVLGNKHFIKKEGDKPKLKF

SEQ ID NO: 552 - protein, 1371 aa, Streptococcus oralis
  Streptococcus oralis SK610
MENKNYSIGLDIGTNSVGWSVITDDYKVPSKKMKVLGNTDKRFIKKNLIGALLFDEGTTAEARRLKRTARRRYTRRKNRLRYLQEIFAEEMSKVDSSFFHRLDDSFLIPEDKRGSKYPIFATLAEEKEYHKQFPTIYHLRKQLADSKEKTDLRLIYLALAHMIKYRGHFLYEDTFDIKNNDIQKIFSEFISIYDNTFEGSSLSGQNAQVEAIFTDKISKSAKRERVLKLFPDEKSTGLFSEFLKLIVGNQADFKKHFDLGEKAPLQFSKDTYDEDLENLLGQIGDDFADLFLVAKKLYDAILLSGILTVTDPSTKAPLSASMIERYENHQKDLAVLKQFIKNNLPEKYDEVFSDQSKDGYAGYIDGKTTQEAFYKYIKNLLSKFEGTDYFLEKIEREDFLRKQRTFDNGSIPHQIHLQEMNAILRRQGEHYPFLKDNKEKIEKILTFRIPYYVGPLARGNRDFAWLTRNSDEAIRPWNFEEIVDKASSAEDFINKMTNYDLYLPEEKVLPKHSLLYETFAVYNELTKVKFIAEGLRDYQFLDSGQKKQIVTQLFKEKRKVTEKDIIQFLHNVDGYDGIELKGIEKQFNASLSTYHDLLKIIKDKEFMDDSKNEEILENIVHTLTIFEDREMIKQRLAQYDSLFDEKVIKALIRRHYTGWGKLSAKLIDGICDKQTGNTILDYLIDDGKNNRNFMQLINDDGLSFKEITQKAQVVGKTDDVKQVVQELPGSPAIKKGILQSIKIVDELVKVMGHTPESIVIEMARENQTTARGKKNSQQRYKRIEDALKNLASGLDSNILKEHPTNNIQLQNDRLFLYYLQNGRDMYTGKPLDINQLSSYDIDHIVPQAFIKDDSLDNRVLTSLKDNRGKSDNVPSIEVVQKRKAFWQQLLDSKLISERKFNNLTKAERGGLDERDKVGFIKRQLVETRQITKHVAQILDARFNKEVNEKDKKNRTVKIITLKSNLVSNFRKEFRLYKVREINDYHHAHDAYLNAVVAKAILKKYPKLEPEFVYGDYQKYDLKRYISRSRNPKEVEKATEKYFFYSNLLNFFKEEVHYADGTIVKRENIEYSKDTGEIAWNKEKDFATIKKVLSYPQVNIVKKREVQTGGFSKESILPKGNSDKLIPRKTKDILWETTKYGGFDSPVIAYSILLIADIEKGKAKKLKTVKTLVGITIMEKAAFEENPITFLENKGYHNVRKENILCLPKYSLFELENGRRRLLASAKELQKGNEIVLPVYLTTLLYHSKNVHKLDEPEHLEYIQKHRNEFKDLLNLVSEFSQKYVLADANLEKIQNLYADNEQADIEILANSFINLLTFTALGAPAAFKFFGKDIDRKRYTTVSEILNATLIHQSITGLYETRIDLSKLGED

SEQ ID NO: 553 - protein, 1140 aa, Streptococcus parasanguinis
  Streptococcus parasanguinis F0449
MNGLVLGLDIGIASVGVGILKKDIGEIIHTNSRLFSAATADSNIERRGHRGGKRLTRRKKHRSIRLHDLFEDFGLLTDFSKVSINLNPYQLRVQGLDNQLTNEELFIALKNIVKRRGISYLDDASEDGGTVSSDYGKAVEENRKLLAEQTPGQIQLDRFEKYGQVRGDFNVVENGEKRRLINVFTTSAYSKEAERILRKQQEFNKKITDEFIEDYLTILTGKRKYYHGPGNEKSRTDYGRYTTKKDPEGKYITLDNIFGILIGKCTFYPDEYRASKASYTAQEFNLLNDLNNLTVPTETKKLSEEQKKTIIKYAKTAKTLGASTLLKYIAKLIGASVDQIHGYRIDPNKKPEMHTFETYRKMQSLETISVEELPRKVLDELAHILTLNTEREGIEEAINATLKDTFSQDQVLELVQFRKNNSSLFSKGWHSFSLKLMMELIPELYETSEEQMTILTRLGKQKSKETSKRTKYIDEKELTEEIYNPVVAKSVRQAIKIINEATKKYGIFDNIVIEMARENNEEDAKKEYIKRQKANLDEKNAAMEKAAFQYNGKKELPDNVFHGHKELATKIRLWHQQGEKCLYTGKNIPISDLIQNQYKYEIDHILPLSLSFDDSLSNKVLVLATANQEKGQRTPFQALDSMDDAWSYREFKSYVKDSKLLGNKKKEYLLTEEDISKIEVKQKFIERNLVDTRYSSRVVLNALQDFYKEHQFDTTISVVRGQFTSQLRRKWGLEKSRETYHHHAVDALIIAASSQLRLWKKQNNPLISYTEGQFVDQVTGEIISLSDDEYKELVFKAPYDHFVDTLKSKKFEDSILFSYQVDSKYNRKISDATIYATRKAKLDKENKEYTYTLGKIKDIYALGTKSPSKTGFYKFLDLYNKDKSQFLMFQKDRKTWDEVIEKIIEQYRPFKEYDENGKEVDFNPFEKYRIENGPIRKYSKKGNGPEIKSLKYYDNLLGKFVDITPSESKNPVALLSLNPWRTDVYYNTETSKYEFLGLKYADLCFEKGGAYGISEVKYNKIREKEGIGKESEFKFTLYKNDLILIKDTETNCQQIFRFWSRTGKDNPKSFEKHKIELKPYEKARFEKGEELEVLGKVPPSSNQLQKNMQIENLSIYKVKTDVLGNKHFIKKEGEEPKLKF

SEQ ID NO: 554 - protein, 1130 aa, Streptococcus pasteurianus
MTNGKILGLDIGIASVGVGIIEAKTGKVVHANSRLFSAANAENNAERRGFRGSRRLNRRKKHRVKRVRDLFEKYGIVTDFRNLNLNPYELRVKGLTEQLKNEELFAALRTISKRRGISYLDDAEDDSTGSTDYAKSIDENRRLLKNKTPGQIQLERLEKYGQLRGNFTVYDENGEAHRLINVFSTSDYEKEARKILETQADYNKKITAEFIDDYVEILTQKRKYYHGPGNEKSRTDYGRFRTDGTTLENIFGILIGKCNFYPDEYRASKASYTAQEYNFLNDLNNLKVSTETGKLSTEQKESLVEFAKNTATLGPAKLLKEIAKILDCKVDEIKGYREDDKGKPDLHTFEPYRKLKFNLESINIDDLSREVIDKLADILTLNTEREGIEDAIKRNLPNQFTEEQISEIIKVRKSQSTAFNKGWHSFSAKLMNELIPELYATSDEQMTILTRLEKFKVNKKSSKNTKTIDEKEVTDEIYNPVVAKSVRQTIKIINAAVKKYGDFDKIVIEMPRDKNADDEKKFIDKRNKENKKEKDDALKRAAYLYNSSDKLPDEVFHGNKQLETKIRLWYQQGERCLYSGKPISIQELVHNSNNFEIDHILPLSLSFDDSLANKVLVYAWTNQEKGQKTPYQVIDSMDAAWSFREMKDYVLKQKGLGKKKRDYLLTTENIDKIEVKKKFIERNLVDTRYASRVVLNSLQSALRELGKDTKVSVVRGQFTSQLRRKWKIDKSRETYHHHAVDALIIAASSQLKLWEKQDNPMFVDYGKNQVVDKQTGEILSVSDDEYKELVFQPPYQGFVNTISSKGFEDEILFSYQVDSKYNRKVSDATIYSTRKAKIGKDKKEETYVLGKIKDIYSQNGFDTFIKKYNKDKTQFLMYQKDSLTWENVIEVILRDYPTTKKSEDGKNDVKCNPFEEYRRENGLICKYSKKGKGTPIKSLKYYDKKLGNCIDITPEESRNKVILQSINPWRADVYFNPETLKYELMGLKYSDLSFEKGTGNYHISQEKYDAIKEKEGIGKKSEFKFTLYRNDLILIKDIASGEQEIYRFLSRTMPNVNHYVELKPYDKEKFDNVQELVEALGEADKVGRCIKGLNKPNISIYKVRTDVLGNKYFVKKKGDKPKLDFKNNKK

SEQ ID NO: 555 - protein, 1374 aa, Streptococcus pseudoporcinus
  Streptococcus pseudoporcinus LQ 940-04
MKKRYSYSIGLDIGTNSVGWAVINEDYKVPAKKMTVFGNTDRKTIKKNLLGTVLFDSGETAQARRLKRTNRRRYTRRRYRLCQLQNIFATEMVKVDDTFFQRLSESFFYYQDKAFDKHPIFGNSKEERAYHKTYPTIYHLRKDLADRDQKADLRLIYLALSHIIKFRGHFLIEGKLNSENTDVQKLFIALVTVYNLLFEEEPIAGETCDAKALLTAKTSKSKRLESLISEFPGQKKNGLFGNLLALALGLRPNFKSNFGLSEDAKLQITKDTYEEELDNLLAEIGDHYADLFLAAKNLSDAILLSDILTLSDENTRAPLSASMIKRYEEHQEDLALLKKLVKEQMPEKYWEIFSNAKKNGYAGYIEGKVSQEDFYRYIKPILSRLKGGDEFLAKIDRDDFLRKQRTFDNGSIPHQIHLKELHAILRRQEKYYPFLAEQKEKIEQLLCFRIPYYVGPLAKGGNSSFAWLKRRSDEPITPWNFKDVVDEEASAQAFIEGMTNYDTYLPEEKVLPKHSPLYEMFTVYNELTKVKYIAENMTKPLYLSAEQKEAIIDHLFKQTRKVTVKDLKEKYFSQIEGLENVDVTGVEGAFNASLGTYNDLLKIIKDKAFLDDEANAEILEEIVLILTLFQDEKLIEKRLAKYANLFEKSVLKKLRKRHYRGWGRLSRQLIDGMKDKASGKTILDFLKADDFANRNFIQLINDSSLDFEKLIDDAQKKAIKRESLTEAVANLAGSPAIKKGILQSLKVVDEIVKVMGHNPDNIVIEMSRENQTTAQGLKNARQRLKKIKEVHKKTGSRILEDNSERITNLTLQDNRLYLYLLQDGKDMYTGQDLDINNLSQYDIDHIIPQSFIKDNSIDNLVLTTQKANRGKSDNVPSIEVVRDMKDRVWRRQLANGAISRQKFDHLTKAERGGLADSDKARFLRRQLVETRQITKHVAQLLDSRFNSKSNQNKKLARNVKIITLKSKIVSDFRKDFGLYKLREVNNYHHAHDAYLNAVVGTALLKKYPKLEAEFVYGDYKHFDLVKLISKSDPSLGKATAKVFFYSNIMNFFKEELSLADGTLMKRPVIETNTETGEVVWDKVKDFKTIRKVLSYPQVNIVKKTEIQSGAFSKESVLSKGNSDKLIERKKGWDPKKYGGFDSPNTAYSIFVVAKVAKRKAQKLKTVKEIVGITIMEQAEYEKDNIAFLEKKGYQDIQEKLLIKLPKYSLFELENGRRRLLASANEFQKGNELALSGKYMKFLYLASRYDKLSSKIESEQQKKLFVEQHLHYFDEILDIVVKHATCYIKAENNLKKIISLYKKKEAYSINEQALNMLNLFIFTSLGAPSTFVFFDETIDRKRYTTSSDVLNGILIQQSITGLYETRIDLSRFGGD

SEQ ID NO: 556 - protein, 1368 aa, Streptococcus pyogenes
  Streptococcus pyogenes MGAS10270
MDKKYSIGLDIGTNSVGWAVITDDYKVPSKKFKVLGNTDRHSIKKNLIGALLFDSGETAEATRLKRTARRRYTRRKNRICYLQEIFSNEMAKVDDSFFHRLEESFLVEEDKKHERHPIFGNIVDEVAYHEKYPTIYHLRKKLVDSTDKADLRLIYLALAHMIKFRGHFLIEGDLNPDNSDVDKLFIQLVQTYNQLFEENPINASGVDAKAILSARLSKSRRLENLIAQLPGEKKNGLFGNLIALSLGLTPNFKSNFDLAEDAKLQLSKDTYDDDLDNLLAQIGDQYADLFLAAKNLSDAILLSDILRLNSEITKAPLSASMIKRYDEHHQDLTLLKALVRQQLPEKYKEIFFDQSKNGYAGYIDGGASQEEFYKFIKPILEKMDGTEELLAKLNREDLLRKQRTFDNGSIPHQIHLGELHAILRRQEDFYPFLKDNREKIEKILTFRIPYYVGPLARGNSRFAWMTRKSEETITPWNFEEVVDKGASAQSFIERMTNFDKNLPNEKVLPKHSLLYEYFTVYNELTKVKYVTEGMRKPAFLSGEQKKAIVDLLFKTNRKVTVKQLKEDYFKKIECFDSVEISGVEDRFNASLGTYHDLLKIIKDKDFLDNEENEDILEDIVLTLTLFEDREMIEERLKTYAHLFDDKVMKQLKRRRYTGWGRLSRKLINGIRDKQSGKTILDFLKSDGFANRNFMQLIHDDSLTFKEDIQKAQVSGQGDSLHEHIANLAGSPAIKKGILQTVKVVDELVKVMGRHKPENIVIEMARENQTTQKGQKNSRERMKRIEEGIKELGSQILKEHPVENTQLQNEKLYLYYLQNGRDMYVDQELDINRLSDYDVDHIVPQSFIKDDSIDNKVLTRSDKNRGKSDNVPSEEVVKKMKNYWRQLLNAKLITQRKFDNLTKAERGGLSELDKAGFIKRQLVETRQITKHVAQILDSRMNTKYDENDKLIREVKVITLKSKLVSDFRKDFQFYKVREINNYHHAHDAYLNAVVGTALIKKYPKLESEFVYGDYKVYDVRKMIAKSEQEIGKATAKYFFYSNIMNFFKTEITLANGEIRKRPLIETNGETGEIVWDKGRDFATVRKVLSMPQVNIVKKTEVQTGGFSKESILPKRNSDKLIARKKDWDPKKYGGFDSPTVAYSVLVVAKVEKGKSKKLKSVKELLGLTIMERSSFEKNPIDFLEAKGYKEVKKDLIIKLPKYSLFELENGRKRMLASAGELQKGNELALPSKYVNFLYLASHYEKLKGSPEDNEQKQLFVEQHKHYLDEIIEQISEFSKRVILADANLDKVLSAYNKHRDKPIREQAENIIHLFTLTNLGAPAAFKYFDTTIDRKRYTSTKEVLDATLIHQSITGLYETRIDLSQLGGD

SEQ ID NO: 557 - protein, 1371 aa, Streptococcus pyogenes
MDKKYSIGLDIGTNSVGWAVITDDYKVPSKKFKVLGNTDRHSIKKNLIGALLFDSGETAEATRLKRTARRRYTRRKNRICYLQEIFSNEMAKVDDSFFHRLEESFLVEEDKKHERHPIFGNIVDEVAYHEKYPTIYHLRKKLADSTDKADLRLIYLALAHMIKFRGHFLIEGDLNPDNSDVDKLFIQLVQTYNQLFEENPINASRVDAKAILSARLSKSRRLENLIAQLPGEKKNGLFGNLIALSLGLTPNFKSNFDLAEDAKLQLSKDTYDDDLDNLLAQIGDQYADLFLAAKNLSDATLLSDILRVNSEITKAPLSASMIKRYDEHHQDLTLLKALVRQQLPEKYKEIFFDQSKNGYAGYIDGGASQEEFYKFIKPILEKMDGTEELLAKLNREDLLRKQRTFDNGSIPHQIHLGELHAILRRQEDFYPFLKDNREKIEKILTFRIPYYVGPLARGNSRFAWMTRKSEETITPWNFEEVVDKGASAQSFIERMTNFDKNLPNEKVLPKHSLLYEYFTVYNELTKVKYVTEGMRKPAFLSGEQKKAIVDLLFKTNRKVTVKQLKEDYFKKIECFDSVEISGVEDRFNASLGTYHDLLKIIKDKDFLDNEENEDILEDIVLTLTLFEDKEMIEERLKTYAHLFDDKVMKQLKRRHYTGWGRLSRKLINGIRDKQSGKTILDFLKSDGFANRNFIQLIHDDSLTFKEAIQKAQVSGQGHSLHEQIANLAGSPAIKKGILQSVKVVDELVKVMGHKPENIVIEMARENQTTQKGQKNSRERMKRIEEGIKELGSQILKEHPVENTQLQNEKLYLYYLQNGRDMYVDQELDINRLSDYDVDHIVPQSFIKDDSIDNKVLTRSDKNRGKSDDVPSEEVVKKMKNYWRQLLNAKLITQRKFDNLTKAERGGLSELDKAGFIKRQLVETRQITKHVAQILDSRMNTKYDENDKLIREVKVITLKSKLVSDFRKDFQFYKVREINNYHHAHDAYLNAVVGTALIKKYPKLESEFVYGDYKVYDVRKMIAKSEQEIGKATAKRFFYSNIMNFFKTEITLANGEIRKRPLIETNEETGEIVWDKGRDFATVRKVLSMPQVNIVKKTEVQTGALTNESIYARGSFDKLISRKHRFESSKYGGFGSPTVTYSVLVVAKSKVQDGKVKKIKTGKELIGITLLDKLVFEKNPLKFIEDKGYGNVQIDKCIKLPKYSLFEFENGTRRMLASVMANNNSRGDLQKANEMFLPAKLVTLLYHAHKIESSKELEHEAYILDHYNDLYQLLSYIERFASLYVDVEKNISKVKELFSNIESYSISEICSSVINLLTLTASGAPADFKFLGTTIPRKRYGSPQSILSSTLIHQSITGLYETRIDLSQLGSD

SEQ ID NO: 558 - protein, 1367 aa, Streptococcus pyogenes
MDKKYSIGLDIGTNSVGWAVITDDYKVPSKKFKVLGNTDRHSIKKNLIGALLFGSGETAEATRLKRTARRRYTRRKNRICYLQEIFSNEMAKVDDSFFHRLEESFLVEEDKKHERHPIFGNIVDEVAYHEKYPTIYHLRKKLADSTDKADLRLIYLALAHMIKFRGHFLIEGDLNPDNSDVDKLFIQLVQIYNQLFEENPINASRVDAKAILSARLSKSRRLENLIAQLPGEKRNGLFGNLIALSLGLTPNFKSNFDLAEDAKLQLSKDTYDDDLDNLLAQIGDQYADLFLAAKNLSDAILLSDILRVNSEITKAPLSASMIKRYDEHHQDLTLLKALVRQQLPEKYKEIFFDQSKNGYAGYIDGGASQEEFYKFIKPILEKMDGTEELLVKLNREDLLRKQRTFDNGSIPHQIHLGELHAILRRQEDFYPFLKDNREKIEKILTFRIPYYVGPLARGNSRFAWMTRKSEETITPWNFEEVVDKGASAQSFIERMTNFDKNLPNEKVLPKHSLLYEYFTVYNELTKVKYVTEGMRKPAFLSGEQKKAIVDLLFKTNRKVTVKQLKEDYFKKIECFDSVEISGVEDRFNASLGAYHDLLKIIKDKDFLDNEENEDILEDIVLTLTLFEDRGMIEERLKTYAHLFDDKVMKQLKRRRYTGWGRLSRKLINGIRDKQSGKTILDFLKSDGFANRNFMQLIHDDSLTFKEDIQKAQVSGQGHSLHEQIANLAGSPAIKKGILQTVKIVDELVKVMGHKPENIVIEMARENQTTQKGQKNSRERMKRIEEGIKELGSQILKEHPVENTQLQNEKLYLYYLQNGRDMYVDQELDINRLSDYDVDHIVPQSFIKDDSIDNKVLTRSDKNRGKSDNVPSEEVVKKMKNYWRQLLNAKLITQRKFDNLTKAERGGLSELDKAGFIKRQLVETRQITKHVAQILDSRMNTKYDENDKLIREVKVITLKSKLVSDFRKDFQFYKVREINNYHHAHDAYLNAVVGTALIKKYPKLESEFVYGDYKVYDVRKMIAKSEQEIGKATAKYFFYSNIMNFFKTEITLANGEIRKRPLIETNGETGEIVWDKGRDFATVRKVLSMPQVNIVKKTEVQTGGFSKESILPKRNSDKLIARKKDWDPKKYGGFDSPTVAYSVLVVAKVEKGKSKKLKSVKELLGITIMERSSFEKNPIDFLEAKGYKEVKKDLIIKLPKYSLFELENGRKRMLASAGELQKGNELALPSKYVNFLYLASHYEKLKGSPEDNEQKQLFVEQHKHYLDEIIEQISEFSKRVILADANLDKVLSAYNKHRDKPIREQAENIIHLFTLTNLGAPAAFKYFDTTIDRKRYTSTKEVLDATLIHQSITGLYETRIDLSQLGGD

SEQ ID NO: 559 - protein, 1368 aa, Streptococcus sp.
MDKKYSIGLDIGTNSVGWAVITDDYKVPSKKFKVLGNTDRHSIKKNLIGALLFDSGEIAEATRLKRTARRRYTRRKNRICYLQEIFSNEMAKVDDSFFHRLEESFLVEEDKKHERHPIFGNIVDEVAYHEKYPTIYHLRKKLVDSTDKADLRLIYLALAHMIKFRGHFLIEGDLNPDNSDVDKLFIQLVQTYNQLFEENPINASGVDAKAILSARLSKSRRLENLIAQLPGEKKNGLFGNLIALSLGLTPNFKSNFDLAEDAKLQLSKDTYDDDLDNLLAQIGDQYADLFLAAKNLSDAILLSDILRLNSEITKAPLSASMIKRYDEHHQDLTLLKALVRQQLPEKYKEIFFDQSKNGYAGYIDGGASQEEFYKFIKPILEKMDGTEELLAKLNREDLLRKQRTFDNGSIPHQIHLGELHAILRRQEDFYPFLKDNREKIEKILTFRIPYYVGPLARGNSRFAWMTRKSEETITPWNFEEVVDKGASAQSFIERMTNFDKNLPNEKVLPKHSLLYEYFTVYNELTKVKYVTEGMRKPAFLSGEQKKAIVDLLFKTNRKVTVKQLKEDYFKKIECFDSVEISGVEDRFNASLGTYHDLLKIIKDKDFLDNEENEDILEDIVLTLTLFEDREMIEERLKTYAHLFDDKVMKQLKRRRYTGWGRLSRKLINGIRDKQSGKTILDFLKSDGFANRNFMQLIHDDSLTFKEDIQKAQVSGQGDSLHEHIANLAGSPAIKKGILQTVKVVDELVKVMGRHKPENIVIEMARENQTTQKGQKNSRERMKRIEEGIKELGSQILKEHPVENTQLQNEKLYLYYLQNGRDMYVDQELDINRLSDYDVDHIVPQSFIKDDSIDNKVLTRSDKNRGKSDNVPSEEVVKKMKNYWRQLLNAKLITQRKFDNLTKAERGGLSELDKAGFIKRQLVETRQITKHVAQILDSRMNTKYDENDKLIREVKVITLKSKLVSDFRKDFQFYKVREINNYHHAHDAYLNAVVGTALIKKYPKLESEFVYGDYKVYDVRKMLAKSEQEIGKATAKYFFYSNIMNFFKTEITLANGEIRKRPLIETNGETGEIVWDKGRDFATVRKVLSMPQVNIVKKTEVQTGGFSKESILPKRNSDKLIARKKDWDPKKYGGFDSPTVAYSVLVVAKVEKGKSKKLKSVKELLGITIMERSSFEKNPIDFLEAKGYKEVRKDLIIKLPKYSLFELENGRKRMLASAGELQKGNELALPSKYVNFLYLASHYEKLKGSPEDNEQKQLFVEQHKHYLDEIIEQISEFSKRVILADANLDKVLSAYNKHRDKPIREQAENIIHLFTLTNLGAPTAFKYFDTTIDRKRYTSTKEVLDATFIHQSITGLYETRIDLSQLGGD

SEQ ID NO: 560 - protein, 1368 aa, Streptococcus pyogenes
MDKKYSIGLDIGTNSVGWAVITDDYKVPSKKLKGLGNTDRHGIKKNLIGALLFDSGETAEATRLKRTARRRYTRRKNRICYLQEIFSNEMAKVDDSFFHRLEESFLVEEDKKHERHPIFGNIVDEVAYHEKYPTIYHLRKKLADSTDKVDLRLIYLALAHMIKFRGHFLIEGDLNPDNSDVDKLFIQLVQTYNQLFEENPINASRVDAKAILSARLSKSRRLENLIAQLPGEKKNGLFGNLIALSLGLTPNFKSNFDLAEDAKLQLSKDTYDDDLDNLLAQIGDQYADLFLAAKNLSDATLLSDILRVNSEITKAPLSASMIKRYDEHHQDLTLLKALVRQQLPEKYKEIFFDQSKNGYAGYIDGGASQEEFYKFIKPILEKMDGTEELLAKLNREDLLRKQRTFDNGSIPYQIHLGELHAILRRQEDFYPFLKDNREKIEKILTFRIPYYVGPLARGNSRFAWMTRKSEETITPWNFEEVVDKGASAQSFIERMTNFDKNLPNEKVLPKHSLLYEYFTVYNELTKVKYVTEGMRKPAFLSGEQKKAIVDLLFKTNRKVTVKQLKEDYFKKIECFDSVEISGVEDRFNASLGTYHDLLKIIKDKDFLDNEENEDILEDIVLTLTLFEDREMIEERLKTYAHLFDDKVMKQLKRRRYTGWGRLSRKLINGIRDKQSGKTILDFLKSDGFANRNFMQLIHDDSLTFKEDIQKAQVSGQGDSLHEHIANLAGSPAIKKGILQTVKVVDELVKVMGRHKPENIVIEMARENQTTQKGQKNSRERMKRIEEGIKELGSDILKEYPVENTQLQNEKLYLYYLQNGRDMYVDQELDINRLSDYDVDHIVPQSFLKDDSIDNKVLTRSDKNRGKSDNVPSEEVVKKMKNYWRQLLNAKLITQRKFDNLTKAERGGLSELDKVGFIKRQLVETRQITKHVAQILDSRMNTKYDENDKLIREVRVITLKSKLVSDFRKDFQFYKVREINNYHHAHDAYLNAVVGTALIKKYPKLESEFVYGDYKVYDVRKMIAKSEQEIGKATAKYFFYSNIMNFFKTEITLANGEIRKRPLIETNGETGEIVWDKGRDFATVRKVLSMPQVNIVKKTEVQTGGFSKESILPKRNSDKLIARKKDWDPKKYGGFDSPTVAYSVLVVAKVEKGKSKKLKSVKELLGITIMERSSFEKDPIDFLEAKGYKEVRKDLIIKLPKYSLFELENGRKRMLASAGELQKGNELALPSKYVNFLYLASHYEKLKGSPEDNEQKQLFVEQHKHYLDEIIEQISEFSKRVILADANLDKVLSAYNKHRDKPIREQAENIIHLFTLTNLGAPAAFKYFDTTIDRKRYTSTKEVLDATLIHQSITGLYETRIDLSQLGGD

SEQ ID NO: 561 - protein, 1368 aa, Streptococcus pyogenes
MDKKYSIGLDIGTNSVGWAVITDDYKVPSKKFKVLGNTDRHSIKKNLIGALLFDSGETAEATRLKRTARRRYTRRKNRICYLQEIFSNEMAKVDDSFFHRLEESFLVEEDKKHERHPIFGNIVDEVAYHEKYPTIYHLRKKLVDSTDKADLRLIYLALAHMIKFRGHFLIEGDLNPDNSDVDKLFIQLVQTYNQLFEENPINASGVDAKAILSARLSKSRRLENLIAQLPGEKKNGLFGNLIALSLGLTPNFKSNFDLAEDAKLQLSKDTYDDDLDNLLAQIGDQYADLFLAAKNLSDAILLSDILRVNTEITKAPLSASMIKRYDEHHQDLTLLKALVRQQLPEKYKEIFFDQSKNGYAGYIDGGASQEEFYKFIKPILEKMDGTEELLVKLNREDLLRKQRTFDNGSIPHQIHLGELHAILRRQEDFYPFLKDNREKIEKILTFRIPYYVGPLARGNSRFAWMTRKSEETITPWNFEEVVDKGASAQSFIERMTNFDKNLPNEKVLPKHSLLYEYFTVYNELTKVKYVTEGMRKPAFLSGEQKKAIVDLLFKTNRKVTVKQLKEDYFKKIECFDSVEISGVEDRFNASLGTYHDLLKIIKDKDFLDNEENEDILEDIVLTLTLFEDREMIEERLKTYAHLFDDKVMKQLKRRRYTGWGRLSRKLINGIRDKQSGKTILDFLKSDGFANRNFMQLIHDDSLTFKEDIQKAQVSGQGDSLHEHIANLAGSPAIKKGILQTVKVVDELVKVMGRHKPENIVIEMARENQTTQKGQKNSRERMKRIEEGIKELGSQILKEHPVENTQLQNEKLYLYYLQNGRDMYVDQELDINRLSDYDVDHIVPQSFLKDDSIDNKVLTRSDKNRGKSDNVPSEEVVKKMKNYWRQLLNAKLITQRKFDNLTKAERGGLSELDKAGFIKRQLVETRQITKHVAQILDSRMNTKYDENDKLIREVKVITLKSKLVSDFRKDFQFYKVREINNYHHAHDAYLNAVVGTALIKKYPKLESEFVYGDYKVYDVRKMIAKSEQEIGKATAKYFFYSNIMNFFKTEITLANGEIRKRPLIETNGETGEIVWDKGRDFATVRKVLSMPQVNIVKKTEVQTGGFSKESILPKRNSDKLIARKKDWDPKKYGGFDSPTVAYSVLVVAKVEKGKSKKLKSVKELLGITIMERSSFEKNPIDFLEAKGYKEVKKDLIIKLPKYSLFELENGRKRMLASAGELQKGNELALPSKYVNFLYLASHYEKLKGSPEDNEQKQLFVEQHKHYLDEIIEQISEFSKRVILADANLDKVLSAYNKHRDKPIREQAENIIHLFTLTNLGAPAAFKYFDTTIDRKRYTSTKEVLDATLIHQSITGLYETRIDLSQLGGD

SEQ ID NO: 562 - protein, 1368 aa, Streptococcus pyogenes
MDKKYSIGLDIGTNSVGWAVITDDYKVPSKKFKVLGNTDRHSIKKNLIGALLFDSGETAEATRLKRTARRRYTRRKNRICYLQEIFSNEMAKVDDSFFHRLEESFLVEEDKKHERHPIFGNIVDEVAYHEKYPTIYHLRKKLVDSTDKADLRLIYLALAHMIKFRGHFLIEGDLNPDNSDVDKLFIQLVQTYNQLFEENPINASGVDAKAILSARLSKSRRLENLIAQLPGEKKNGLFGNLIALSLGLTPNFKSNFDLAEDAKLQLSKDTYDDDLDNLLAQIGDQYADLFLAAKNLSDAILLSDILRLNSEITKAPLSASMIKRYDEHHQDLTLLKALVRQQLPEKYKEIFFDQSKNGYAGYIDGGASQEEFYKFIKPILEKMDGTEELLAKLNREDLLRKQRTFDNGSIPHQIHLGELHAILRRQEDFYPFLKDNREKIEKILTFRIPYYVGPLARGNSRFAWMTRKSEETITPWNFEEVVDKGASAQSFIERMTNFDKNLPNEKVLPKHSLLYEYFTVYNELTKVKYVTEGMRKPAFLSGEQKKAIVDLLFKTNRKVTVKQLKEDYFKKIECFDSVEISGVEDRFNASLGTYHDLLKIIKDKDFLDNEENEDILEDIVLTLTLFEDREMIEERLKTYAHLFDDKVMKQLKRRRYTGWGRLSRKLINGIRDKQSGKTILDFLKSDGFANRNFMQLIHDDSLTFKEDIQKAQVSGQGDSLHEHIANLAGSPAIKKGILQTVKVVDELVKVMGRHKPENIVIEMARENQTTQKGQKNSRERMKRIEEGIKELGSQILKEHPVENTQLQNEKLYLYYLQNGRDMYVDQELDINRLSDYDVDHIVPQSFIKDDSIDNKVLTRSDKNRGKSNNVPSEEVVKKMKNYWRQLLNAKLITQRKFDNLTKAERGGLSELDKAGFIKRQLVETRQITKHVAQILDSRMNTKYDENDKLIREVKVITLKSKLVSDFRKDFQFYKVREINNYHHAHDAYLNAVVGTALIKKYPKLESEFVYGDYKVYDVRKMIAKSEQEIGKATAKYFFYSNIMNFFKTEITLANGEIRKRPLIETNGETGEIVWDKGRDFATVRKVLSMPQVNIVKKTEVQTGGFSKESILPKRNSDKLIARKKDWDPKKYGGFDSPTVAYSVLVVAKVEKGKSKKLKSVKELLGITIMERSSFEKNPIDFLEAKGYKEVRKDLIVKLPKYSLFELENGRKRMLASAGELQKGNELALPSKYVNFLYLASHYEKLKGSPEDNEQKQLFVEQHKHYLDEIIEQISEFSKRVILADANLDKVLSAYNKHRDKPIREQAENIIHLFTLTNLGAPAAFKYFDTTIDRKRYTSTKEVLDATFIHQSITGLYETRIDLSQLGGD

SEQ ID NO: 563 - protein, 1368 aa, Streptococcus pyogenes
MDKKYSIGLDIGTNSVGWAVITDDYKVPSKKFKVLGNTDRHSIKKNLIGALLFDSGEIAEATRLKRTARRRYTRRKNRICYLQEIFSNEMAKVDDSFFHRLEESFLVEEDKKHERHPIFGNIVDEVAYHEKYPTIYHLRKKLVDSTDKADLRLIYLALAHMIKFRGHFLIEGDLNPDNSDVDKLFIQLVQTYNQLFEENPINASGVDAKAILSARLSKSRRLENLIAQLPGEKKNGLFGNLIALSLGLTPNFKSNFDLAEDAKLQLSKDTYDDDLDNLLAQIGDQYADLFLAAKNLSDAILLSDILRLNSEITKAPLSASMIKRYDEHHQDLTLLKALVRQQLPEKYKEIFFDQSKNGYAGYIDGGASQEEFYKFIKPILEKMDGTEELLAKLNREDLLRKQRTFDNGSIPHQIHLGELHAILRRQEDFYPFLKDNREKIEKILTFRIPYYVGPLARGNSRFAWMTRKSEETITPWNFEEVVDKGASAQSFIERMTNFDKNLPNEKVLPKHSLLYEYFTVYNELTKVKYVTEGMRKPAFLSGEQKKAIVDLLFKTNRKVTVKQLKEDYFKKIECFDSVEISGVEDRFNASLGTYHDLLKIIKDKDFLDNEENEDILEDIVLTLTLFEDREMIEERLKTYAHLFDDKVMKQLKRRRYTVWGRLSRKLINGIRDKQSGKTILDFLKSDGFANRNFMQLIHDDSLTFKEDIQKAQVSGQGDSLHEHIANLAGSPAIKKGILQTVKVVDELVKVMGRHKPENIVIEMARENQTTQKGQKNSRERMKRIEEGIKELGSQILKEHPVENTQLQNEKLYLYYLQNGRDMYVDQELDINRLSDYDVDHIVPQSFIKDDSIDNKVLTRSDKNRGKSDNVPSEEVVKKMKNYWRQLLNAKLITQRKFDNLTKAERGGLSELDKAGFIKRQLVETRQITKHVAQILDSRMNTKYDENDKLIREVKVITLKSKLVSDFRKDFQFYKVREINNYHHAHDAYLNAVVGTALIKKYPKLESEFVYGDYKVYDVRKMLAKSEQEIGKATAKYFFYSNIMNFFKTEITLANGEIRKRPLIETNGETGEIVWDKGRDFATVRKVLSMPQVNIVKKTEVQTGGFSKESILPKRNSDKLIARKKDWDPKKYGGFDSPTVAYSVLVVAKVEKGKSKKLKSVKELLGITIMERSSFEKNPIDFLEAKGYKEVRKDLIIKLPKYSLFELENGRKRMLASAGELQKGNELALPSKYVNFLYLASHYEKLKGSPEDNEQKQLFVEQHKHYLDEIIEQISEFSKRVILADANLDKVLSAYNKHRDKPIREQAENIIHLFTLTNLGAPTAFKYFDTTIDRKRYTSTKEVLDATFIHQSITGLYETRIDLSQLGGD

SEQ ID NO: 564 - protein, 1368 aa, Streptococcus pyogenes
MDKKYSIGLDIGTNSVGWAVITDDYKVPSKKFKVLGNTDRHSIKKNLIGALLFDSGETAEATRLKRTARRRYTRRKNRICYLQEIFSNEIAKVDDSFFHRLEESFLVEEDKKHERHPIFGNIVDEVAYHEKYPTIYHLRKKLADSTDKADLRLIYLALAHMIKFRGHFLIEGDLNPDNSDVDKLFIQLVQTYNQLFEENPINASRVDAKAILSARLSKSRRLENLIAQLPGEKRNGLFGNLIALSLGLTPNFKSNFDLAEDAKLQLSKDTYDDDLDNLLAQIGDQYADLFLAAKNLSDAILLSDILRVNTEITKAPLSASMIKRYDEHHQDLTLLKALVRQQLPEKYKEIFFDQSKNGYAGYIDGGASQEEFYKFIKPILEKMDGTEELLAKLNREDLLRKQRTFDNGSIPHQIHLGELHAILRRQEDFYPFLKDNREKIEKILTFRIPYYVGPLARGNSRFAWMTRKSEETITPWNFEEVVDKGASAQSFIERMTNFDKNLPNEKVLPKHSLLYEYFTVYNELTKVKYVTEGMRKPAFLSGEQKKAIVDLLFKTNRKVTVKQLKEDYFKKIECFDSVEISGVEDRFNASLGTYHDLLKIIKDKDFLDNEENEDILEDIVLTLTLFEDREMIEERLKTYAHLFDDKVMKQLKRRRYTGWGRLSRKLINGIRDKQSGKTILDFLKSDGFANRNFMQLIHDDSLTFKEDLQKAQVSGQGDSLHEHIANLAGSPAIKKGILQTVKVVDELVKVMGRHKPENIVIEMARENQTTQKGQKNSRERMKRIEEGIKELGSDILKEYPVETTQLQNEKLYLYYLQNGRDMYVDQELDINRLSDYDVDHIVPQSFLKDDSIDNKVLTRSDKNRGKSDNVPSEEVVKKMKNYWKQLLNAKLITQRKFDNLTKAERGGLSELDKAGFIKRQLVETRQITKHVAQILDSRMNTKYDENDKLIREVRVITLKSKLVSDFRKDFQFYKVREINNYHHAHDAYLNAVVGTALIKKYPKLESEFVYGDYKVYDIRKMIAKSEQEIGKATAKYFFYSNIMNFFKTEITLANGEIRKRPLIETNGETGEIVWDKGRDFATVRKVLSMPQVNIVKKTEVQTGGFSKESILPKRNSDKLIARKKDWDPKKYGGFDSPTVAYSVLVVAKVEKGKSKKLKSVKELVGITIMERSSFEKDPVDFLEAKGYKEVRKDLIIKLPKYSLFELENGRKRMLASAGELQKGNELALPSKYVNFLYLASHYEKLKGSPEDNEQKQLFVEQHKHYLDEIIEQISEFSKRVILADANLDKVLSAYNKHRDKPIREQAENIIHLFTLTNLGAPAAFKCFDTTIGRNRYKSIKEVLDATLIHQSITGLYETRIDLSQLGGD

SEQ ID NO: 565 - protein, 1368 aa, Streptococcus pyogenes [sequence omitted]

SEQ ID NO: 566 - protein, 1368 aa, Streptococcus pyogenes; identical to SEQ ID NO: 560

SEQ ID NO: 567 - protein, 1370 aa, Streptococcus ratti
  Streptococcus ratti FA-1 = DSM 20564
MKKPYSIGLDIGTNSVGWAVITDDYKVPAKKMKVLGNTDKNYIKKNLLGALLFDSGNTAEDRRLKRTARRRYTRRRNRLLYLQDIFSDEMNKVDESFFHRLEDSFLVSEDKRGDHHPIFGNVVDEVKYHEQFPTIYHLRKYLADTPEKADLRLVYLALAHMIKFRGHFLIDDPKLDVKNTDSQELFSQFLTAYDVTQEDSHLADVKINISDIITEKMNKSRKVEALLFHFPSQKKNSFFGNLVSLVFGLLPNFKTNFNLAEDAKLQLSKDSYDEDLENLLGQIGDEYTDVFVAARKLYDSILLSGILTVNDLSTKAILSASMVRRYEEHNKDLAKLKAFVKANFTHDVFKEVFSDASKNGYAGYIEGKTSQEDFYKYVKNLIGKVDGSADFIEKIDREDFLRKQRTFDNGSIPHQVHLAEMKAILRRQGEYYPFLKEHAEKIQQILTFRIPYYVGPLDRHGHSDFAWASFNSEEKVTPWNFEEIIDKNKSAQAFIERMTNQDLYLPNEKVLPKHSPLYEKYTVYNELTKIKYVTETGTAKFFDANLKQEIFDGLFKKERKVTKRKLLTFLEKNFDEFRIVDIQGLDKETETFNASYGIYQDLLKIIKDKAFMDDSENADILEDIVLTLTLFEDREMIKQRLAKYADLFDKKVIDNLARRRYTGWGRLSAKLLNGIRDKRSRKTIMDYLVDDGRSNRNLMQLITDDNLTFKDEIAKAQYSDNSDDLHQVVQDLAGSPAIKKGILQSVKIVDELVKVMGYEPEQIVVEMARENQTTAKGRRNSQQRYKRLEEAIKNLDRDLNYKILKEHPTDNQALQNDRLFLYYLQNGRDMYTGESLDINRLSDYDIDHIIPQAFIKDNSIDNRVLVSSAKNRGKSDDVPSEDVVNRMRPFWNKLLNCGLISQRKYSNLTKKELTPNDKAGFIKRQLVETRQITKHVARILDEHFNKEFDEDKKRIRKVKVVTLKSNLVSNFRKEFELYKVREINDYHHAHDAYLNAVVAKALLMKYPKLEPEFVYGEYPKYNSYRERKTATQRMFFYSNIMNMFKSKVKLADERIIERPMIEVNDETGEIAWDKTKHIATVKKVLSYPQINIVKKVEEQTGGLTNETIYPRGSFDKLLNRKNTLEASKYGGFGSPTVAYCVLVVADSKNENGKVKKLKLGSELLGITILEKNDFENNSLDFLSRKGYQGVQEKKIIKLPKYSLFEFQDGSRRMLSSVMANDNKRGDLQKANEMILPAYLVKLLYHAKHINSVGEPAHKNYINEHCSEFQDLLNYIRQFADKFVDVDKNLSKIRSLSKSMAEYSVSEICSSFVNLLTLTALGAPADFKFFGTTIPRKRYGSPQSILSATLIHQSITGLYETRIDLSKLGED

SEQ ID NO: 568 - protein, 1127 aa, Streptococcus salivarius
MSDLVLGLDIGIGSVGVGILNKVTGEIIHKNSRIFPAAQAENNVERRINRQGRRLTRRKKHRRVRLNHLFEESGLITDFTNVSINLNPYQLRVKGLTDELSNEELFIALKNMVKHRGISYLDDASDDGNSSVGDYAQIVKENSKQLETKTPGQIQLERYQKYGQLRGDFTVEEDGKKHRLINVFPTSAYRAEALRILQTQQEFNPQITDEFINSYLQILTGKRKYYHGPGNEKSRTDYGRYTTKKDSEDEYITLDNIFGILIGKCTFYPEEYRAAKASYTAQEFNLLNDLNNLTVPTETKKLSEEQKNQIITNVKNEKAMGPAKLFKYIAKLLSCDVADIKGYRIDKSDKAEIHTFEAYRKMKTLATIDIEQMERENLDKLAYVLTLNTEKEGIQEALEHEFADGTFSQEQIDELVQFRKANSSIFGKGWHSFSVKLMMELIPELYATSEEQMTILTRLGKQKTTSSSNKTKYIDEKQLTEEIYNPVAAKSVRQAIKIVNAAIKEYGDFDNIVIEMARETNEDDEKKAIQKIQKANKDEKDAAMLKAANQYNGKAELPHSVFHGHKQLATKIRLWHQQGERCLYTGKTISIHDLINNSNQFEIDHILPLSITFDDSLANKVLVYATANQEKGQRTPYQALDSMDDAWSFRELKAFVRDSKALSNKKKEYLLTEEDISKFDVRKKFIERNLVDTRYASRVVLNALQEHFRVHKTDTKVSVVRGQFTSQLRRHWGIEKTRDTYHHHAVDALIIAASSQLNLWKKQKNTLVSYSEDQLLDIETGELISDDEYKESVFKAPYQHFVDTLKSKEFEDSILFSYQVDSKFNRKISDATIYATRQAKVGKDKKDETYVLGKIKDIYSQTGYDAFIKIYKKDKSKFLMYRHDPQTFEKVIEPILENYPNKELNEKGKEVPCNPFLKYKEDHGYIRKYSKKGNGPEIKSLKYYDSKLGNHIDITPKNSNNKVVLQSVSPWRADVYFNKTTGKYEILGLKYADLKFEKGTGTYKISEEKYNDIKIKEGVDSDSEFKFTLYKNDLLLIKDTETKEQQLFRFLSRTMPNVKHYVELKPYDKQKFDDNEELIKILGIVAKGGQCKKGVSKPNISIYKIRTDVLGNQHIIKNEGDKPKLDF

SEQ ID NO: 569 - protein, 1385 aa, Streptococcus salivarius
  Streptococcus salivarius K12
MTKPYSIGLDIGTNSVGWAVITDDYKVPSKKMKVLGNTSKKYIKKNLLGALLFDSGITAEGRRLKRTARRRYTRRRNRILYLQEIFSTEMATLDDAFFQRLDDSFLVPDDKRDSKYPIFGNLVEEKVYHDEFPTIYHLRKHLADSSKKADLRLVYLALAHMIKYRGHFLIEGDFNSKNNDLQKNFQDFLDTYNAIFESDLSLENSKQLEEIVKDKISKSAKKDRILKLFPGEKNSGIFSEFLKLIVGNQADFRKYFNLDEKTSLQFSKESYDEDLETLLGHIGDDYSDVFLKAKKLYDAILLSGILTVTDNGTEAPLSSAMIMRYKEHEEDLALLKAYIRNISLETYNEVFKDNTKNGYAGYIDGKTSQEDFYVYLKRLLAGLEGADYFLEKIDREDFLRKQRTFDNGSIPYQIYLQEMRAILDKQAKFYPFLAKNKERIEKILTFRIPYYVGPLARGNSDFAWSIRKRNEKITPWNFEDVIDKESSAEAFINRMTSFDLYLPEEKVLPKHSLLYENFTVYNELTKVRFIAEGMRDYQFLDSKQKKDIVRLYFKGKRKVTDKDIIEYLHAIDGYDGIELKGIEKQFNSSLSTYHDLLNIINDKEFLDDSSNETIIEEIIHTLTMFEDREMIKQRLSKFDNIFDKSVLKKLSRRHYTGWGKLSAKLINGIRDEKSGNTILDYLIDDGVSNRNFMQLIHDDALSFKKKIKKAQIIGDKDNIKQVVKSLPGSPAIKKGILQSIKIVDELVKVMGREPESIVVEMARENQYTNQGKSNSQQRLKRLEESLKGLGSKILKENVPTRLSKIDNNALQNDRLYLYYLQNGKDMYTGEELDIDRLSNYDIDHIIPQAFLKDDSIDNKVLVSSASNRGKSDDVPSLEVVKKRKTLWYQLLKSKLISQRKFDNLTKAERGGLSQEEKAGFIQRQLVETRQITKHVARLLDERFNNKKDENNRTLRTVKIITLKSSLVSQFRKDFELYKVREINDFHHAHDAYLNAVVASALLKKYPKLEPEFVYGDYPKYNSFRERKSATEKVYFYSNIMNIFKKSIPLADGTVIDRPLIEVNEETGESVWNKVADLNTVRKVLSYSQVNIVKKVEEQNHGLDRGKPKGLFNANLSSKPKPNSKENLVGAKEYLDPKKYGGYAGISNSFAILVKGTIEKGAKKKITNVLEFQGISILDRIYYRKDKLNFLLEKGYKDIELIIELPKYSLFELSDGSRRMLASILSTNNKRGEIHKGNQIFISQKFVKLLYHAKRISSTFNENHRKYVENHKKEFEELFYYILEFNENYVGAKKNGELLKSAFQSWQNHSIDELCSSFIGPTGSERKGLFELTSRGGAADFEFLGVKIPRYRDYTPSSLLKDATLIHQSVTGLYETRIDLGKLGED

SEQ ID NO: 570 - protein, 1135 aa, Streptococcus salivarius
  Streptococcus salivarius PS4
MSDLVLGLDIGIGSVGVGILNKVTGEIIHKNSRIFPAAQAENNLERRTNRQGRRLTRRKKHRRVRLNHLFEESGLITDFTKVSINLNPYQLRVKGLTAELSNEELFIALKNMVKHRGISYLDDASDDGNSSVGDYAQIVKENSKQLETKTPGQIQLERYQKYGQLRGDFTVEEDGRKHRLINVFPTSAYHAEALRILQTQQEFNPQITDEFINSYLEILTGKRKYYHGPGNEKSRTDYGKYTTKKDAQGQYITLNNIFGILIGKCTFYPEEYRAAKASYTAQEFNLLNDLNNLTVPTETKKLSEEQKYQIITYVKNEKAMGPAKLFKYIAKLLACDIADIKGYRIDKSDKAEIHTFEAYRKMKTLETIDIEQIEREKLDKLAYVLTLNTEREGIQEALDHEFADGTFSQEQVDELVQFRKANSSIFGKGWHSFSVKLMMELIPELYATSEEQMTILTRLGKQKTTSSSNKTKYIDEKQLTEEIYNPVVAKSVRQAIKIVNAAIKKYGDFDNIVIEMARETNEDDEKKAIQKIQKANKAEKDAAMRKAANQYNGKAELPHSVFHGHKQLATKIRLWHQQGERCLYTGKTISIHDLINNPNQFEIDHILPLSITFDDSLANKVLVYATANQEKGQRTPYQALDSMDDAWSFRELKAFVRESKALSNKKKEYLLTEEDISKFDVRKKFIERNLVDTRYASRVVLNALQEHFKAHKIDTKVSVVRGQFTSQLRRHWGIDKTRDTYHHHAVDALIIAASSQLNLWKKQKNTLVSYSEDQLLDIETGELISDDEYKESVFKAPYQHFVDTLKSKEFEDSILFSYQVDSKFNRKISDATIYATRQAKVGKDKKDETYVLGKIKDIYALGTKTPSKTGFYKFLDLYNKDKSQFLVYQKDRKTWDEVIEKIMEQYRPFKESDKNGKEVDFNPFEKYRIENGPIRKYSRKGNGPEIKSLKYYASKLGNHIDITPKDSNNKVVLQSVSPWRADVYFNKTTGSYEILGLKYADLQFEKGTGTYRISEEKYNDIKKKEGVDSDSEFKFTLYKNDLLLIKDTETKEQRLFRFLSRSMPNKKHYVELKPYSKDKFEKNESLIEILGSADKSGRCIKGLAKSNLSIFKVRTDVLGNQHIIKNEGDKPKLDF

SEQ ID NO: 571 - protein, 1377 aa, Streptococcus sanguinis
  Streptococcus sanguinis SK115
MKKPYSIGLDIGTNSVGWAVITDDYKVPSKKMKVLGNTDKHFIKKNLIGALLFDEGTTAEDRRLKRTSRRRYTRRKNRLRYLQEIFSEEISKLDSSFFHRLDDSFLVPEDKRGSKYPIFATLEEEKEYHKKFPTIYHLRKHLADSKEKTDLRLIYLALAHMIKYRGHFLYEESFDIKNNDIQKIFNEFISIYDNTFEGSSLSGQNAQVEAIFTDKISKSTKRERVLKLFSDEKSTGLFSEFLKLIVGNQADFKKHFDLEEKAPLQFSKDTYDEDLENLLGQIGDGFADLFLVAKKLYDAILLSGILTVTDPSTKAPLSASMIERYENHQEDLAALKQFIKNNLSEKYAEVFSDQSKDGYAGFIDGKTTQEAFYKYIKNLLSKLEGADYFLNKIEREDFLRKQRTFDNGSIPHQIHLQEMNAILRRQGEHYLFLKENREKIEKILAFRIPYYVGPLARGNRDFAWLTRNSDQAIRPWNFEEVVDKASSAEDFINKMTNYDLYLPEEKVLPKHSLLYETFAVYNELTKVKFIAEGLRDYQFLDSGQKKQIVNQLFKDKRKVTEKDIIHYLHNVDGYDGIELKGIEKQFNASLSTYHDLLKIIKDKEFMDNPKNGEILENIIHTLTIFEDREMIKQRLAQYDTLFDEKVIKALTRRHYTGWGKLSAKLINGIRDKQTGKTILEYLIDDGDCNRNFMQLINDDGLSFKEIIQKAQVVGKTDDVKQVVQEIPGSPAIKKGILQSIKIVDELVKVMGHNPESIVIEMARENQTTAKGKKNSQQRYKRIEDALKNLAPGLDSNILKENPTDNIQLQNDRLFLYYLQNGKDMYTGKAIDINQLSNYDIDHIIPQAFIKDDSLDNRVLTSSKDNRGKSDNVPSIEVVQKRKAFWQQLLDSKLISERKFNNLTKAKRGGLDERDKVGFIKRQLVETRQITKHVAQLLDTRFNTEVNEENQKIRTVKIITLKSNLVSNFRKEFGLYKVREINDYHHAHDAYLNAVVAKAILKKYPKLEPEFVYGDYQKYDLKRYILKSKASNTIDKATEKYFFYSNLLNFFKEKVRYADGTIKKRENIEYSNDTGEIAWNKEKDFATIKKVLSLPQVNIVKKTEEQTVGQNGGLFDNNIVSKKKVVDASKLIPIKSSLSPEKYGGYARPTIAYSVLVIADIEKGKGKAKKLKRIKEIVGITIQDKKKFESNPVTYLEECGYKNINSNLIIKLPKYSLFEFNDGQRRLLASSIELQKGNELILPYHLTALLYHAQRINKISEPIHKQYVEAHQNEFKELLTTIISLSKKYIQKPNVELLLQQAFDQADKDIYQLSESFISLLKLTSFGAPGAFKFLGVEISQSSVRYKPNSQFLDTTLIHQSITGLYETRIDLSKLGED

SEQ ID NO: 572 - protein, 1392 aa, Streptococcus sanguinis
  Streptococcus sanguinis SK330
MENKNYSIGLDIGTNSVGWAVITDDYKVPSKKMKVFGNTDKHFIKKNLIGALLFDEGATAEDRRLKRTARRRYTRRKNRLRYLQEIFSEEISKLDSSFFHRLDDSFLVPKDKRGSKYPIFATLEEEKEYHKKFPTIYHLRKHLADSKEKTDLRLIYLALAHMIKYRGHFLYEESFDIKNNDIQKIFNEFISIYDNTFEGSSLSGQNAQVEAIFTDKISKSAKRERVLKLFSDEKSTSLFSEFLKLIVGNQADFKKHFDLEEKAPLQFSKDTYDEDLENLLGQIGDGFTDLFLVAKKLYDAILLSGILTVTDPSTKAPLSASMIERYESHQKDLAALKQFIKNNLPKRYNEVFSDQSKDGYAGYIDGKTTQEAFYKYIKNLLSKFEGADYFLDKIEREDFLRKQRTFDNGSIPHQIHLQEMNAILRRQGEHYPFLKENREKIEKILTFRIPYYVGPLARGNRDFAWLTRNSDQAIRPWNFEEIVDKASSAEEFINKMTNYDLYLPEEKVLPKHSLLYETFAVYNELTKVKFIAEGLRDYQFLDSGQKKQIVNQLFKEKRKVTEKDIIHYLHNVDGYDGIELKGIEKQFNASLSTYHDLLKIIKDKEFMDDPKNEEILENIVHTLTIFEDREMIKQRLAQYDSIFDEKVIKALTRRHYTGWGKLSAKLINGICDKQTGDTILDYLIDDGKINRNFMQLINDDGLSFKEIIQKAQVVGKTDDVKQVVQELPGSPAIKKGILQSIKIVDELVKVMGYAPESIVIEMARENQTTARGKKNSQQRYKRIEDSLKNLAPGLDSNILKENPTDNIQLQNDRLFLYYLQNGKDMYTGKPLDIDQLSSYDIDHIIPQAFIKDDSIDNRVLTSSKDNRGKSDNVPSLEVVQKRKAFWQQLLDSKLISERKFNNLTKAERGGLDERDKVGFIRRQLVETRQITKHVAQILDASFNTEVNEKNQKIRTVKIITLKSNLVSNFRKEFELYKVREINDYHHAHDAYLNAVVAKAILKKYPKLEPEFVYGDYQKYDLKRYISRFKPSKEIEKATEKYFFYSNLLNFFKEEVHYADGIIVKRENIEYSKDTGEIAWNKEKDFATIKKVLSYPQVNIVKKTEIQTHGLDRGKPKGLFNSNPSPKPSEDSKENLVPIKQGLDPRKYGGYAGISNSYAVLVKAIVEKGAKKQQKTILEFQGISILDKINFENNKENYLLKKRYIEILSTITLPKYSLFEFPDGTRRRLASILSTNNKRGEIHKGNELVLPGKYTTLLYHAKNINKKLEPEHLEYVEKHRNDFAKLLECVLNFNDKYVGALKNGERIRQAFTDWETVDIEKLCFSFIGPENSKNAGLFELTSQGSASDFEFLGVKIPRYRDYAPSSLLKATLIHQSITGLYETRIDLSKLGED

SEQ ID NO: 573 - protein, 1370 aa, Streptococcus sanguinis
  Streptococcus sanguinis SK353
MKKPYSIGLDIGTNSVGWAVVTDDYKVPAKKMRVFGDTDRSHIKKNLLGTLLFDDGNTAESRRLKRTARRRYTRRRNRILYLQEIFTESMNEIDESFFHRLDDSFLVPEDKRGSKYPIFATLQEEKEYHKQFPTIYHLRKQLADSKEKSDVRLIYLALAHMIKYRGHFLYEETFDIKNNDIQKIFNEFINIYDNTFEGSSLSGQNAQVEAIFTDKISKSAKRERVLKLFPDEKSTGLFSEFLKLIVGNQADFKKHFDLEEKAPLQFSKDTYDEELENLLGQIGDDFADLFLIAKKLYDAILLSGILTVTDPSTKAPLSASMIERYENHQKDLAALKQFIKNNLPEKYVEVFSDQSKDGYAGYIDGKTTQEAFYKYIKNLLSKFEGADYFLDKIEREDFLRKQRTFDNGSIPHQIHLQEMNAILRRQGEHYPFLKENREKIEKILTFRIPYYVGPLARDNRDFSWLTRNSDEPIRPWNFEEVVDKARSAEDFIHRMTNYDLYLPEEKVLPKHSLLYETFAVYNELTKVKFIAEGLRDYQFLDSGQKKQIVNQLFKEKRKVTEKDIIHYLHNVDGYDGIELKGIEKQFNANLSTYHDLLKITKDKEFMDDPKNEEILENIVHTLTIFEDREMIKQRLAQYDTLFDEKVIKALTRRHYTGWGKLSAKLINGIRDKQSGKTILDYLIDDDKINRNFMQLINDDGLSFKEIIQKAQVVGKTDDVKQVVQELPGSPAIKKGILQSIKIVDELVKVMGYALESIVIEMARENQTTARGKKNSQQRYKRIEDALKNLAPGLDSNILKENPTDNIQLKNDRLFLYYLQNGKDMYTGKPLDINQLSSYDIDHIIPQAFIKDDSIDNRVLTSSKDNRGKSDNVPSLEVVQKRKAFWQQLLDSKLISERKFNNLTKAERGGLDERDKVGFIRRQLVETQQITKNVAQILDARFNTEVKEKNQKIRTVKIITLKSNLVSNFRKEFGLYKVREINNYHHAHDAYLNAVVAKAILKKYPKLEPEFVYGDYQKYDLKKYISRFKPSKEIEKATEKYFFYSNLLNFFKEEVLYADGTIRKRENIEYSKDTGEIAWDKEKDFATIKKVLSYPQVNIVKKREVQTGGFSKESILPKGNSDKLIPRKTKDILWDTTKYGGFDSPVIAYSILLIADIEKGKAKKLKTVKTLVGITIMEKAAFEENPITFLENKGYHNVRKENILCLPKYSLFELENGRRRLLASAKELQKGNEIVLPVCLTTLLYHSKNLHKLDEPEHLEYIQKHRNEFKDLLNLVSEFSQKYILAEANLEKIKDLYADNEQADIEILANSFINLLTFTALGAPAAFKFFGKDVDRKRYTTVSEILNATLIHQSITGLYETRIDLSKLGEE

SEQ ID NO: 574 - protein, 1421 aa, Streptococcus sanguinis
  Streptococcus sanguinis SK49
MTKFNKNYSIGLDIGVSSVGYAVVTEDYRVPAFKFKVLGNTEKEKIKKNLIGSTTFVSAQPAKGTRVFRVNRRRIDRRNHRITYLRDIFQKEIEKVDKNFYRRLDESFRVLGDKSEDLQIKQPFFGDKELETAYHKKYPTIYHLRKHLADADKNSPVADIREVYMAISHILKYRGHFLTLDKINPNNINMQNSWIDFIESCQEVFDLEISDESKNIADIFKSSENRQEKVKKILPYFQQELLKKDKSIFKQLLQLLFGLKTKFKDCFELEEEPDLNFSKENYDENLENFLGSLEEDFSDVFAKLKVLRDTILLSGMLTYTGATHARFSATMVERYEEHRKDLQRFKFFIKQNLSEQDYLDIFGRKTQNGFDVDKETKGYVGYITNKMVLTNPQKQKTIQQNFYDYISGKITGIEGAEYFLNKISDGTFLRKLRTSDNGAIPNQIHAYELEKIIERQGKDYPFLLENKDKLLSILTFKIPYYVGPLAKGSNSRFAWIKRATSSDILDDNDEDTRNGKIRPWNYQKLINMDETRDAFITNLIGNDIILLNEKVLPKRSLIYEEVMLQNELTRVKYKDKYGKAHFFDSELRQNIINGLFKNNSKRVNAKSLIKYLSDNHKDLNAIEIVSGVEKGKSFNSTLKTYNDLKTIFSEELLDSEIYQKELEEIIKVITVFDDKKSIKNYLTKFFGHLEILDEEKINQLSKLRYSGWGRYSAKLLLDIRDEDTGFNLLQFLRNDEENRNLTKLISDNTLSFEPKIKDIQSKSTIEDDIFDEIKKLAGSPAIKRGILNSIKIVDELVQIIGYPPHNIVIEMARENMTTEEGQKKAKTRKTKLESALKNIENSLLENGKVPHSDEQLQSEKLYLYYLQNGKDMYTLDKTGSPAPLYLDQLDQYEVDHIIPYSFLPIDSIDNKVLTHRENNQQKLNNIPDKETVANMKPFWEKLYNAKLISQTKYQRLTTSERTPDGVLTESMKAGFIERQLVETRQIIKHVARILDNRFSDTKIITLKSQLITNFRNTFHIAKIRELNDYHHAHDAYLAVVVGQTLLKVYPKLAPELIYGHHAHFNRHEENKATLRKHLYSNIMRFFNNPDSKVSKDIWDCNRDLPIIKDVIYNSQINFVKRTMIKKGAFYNQNPVGKFNKQLAANNRYPLKTKALCLDTSIYGGYGPMNSALSIIIIAERFNEKKGKIETVKEFHDIFIIDYEKFNNNPFQFLNDTSENGFLKKNNINRVLGFYRIPKYSLMQKIDGTRMLFESKSNLHKATQFKLTKTQNELFFHMKRLLTKSNLMDLKSKSAIKESQNFILKHKEEFDNISNQLSAFSQKMLGNTTSLKNLIKGYNERKIKEIDIRDETIKYFYDNFIKMFSFVKSGAPKDINDFFDNKCTVARMRPKPDKKLLNATLIHQSITGLYETRIDLSKLGED

SEQ ID NO: 575 - protein, 1026 aa, Streptococcus sp.
  Streptococcus sp. BS35b
MNGLVLGLDIGIASVGVGILEKNSGKIIHANSRLFPAATADNNVERRKNRQARRLNRRKKHRGVRFQDLFEDYGLLTDFSKVSINLNPYRLRVDGLNQQLTNEELFIALKNIVKRRGISYLDDASEDGGAVSSDYGKAVEENRKLLAEQTPGQIQLERFEKYGQVRGDFTVVENGEKRRLINVFSTSAYRKEAEKILRKQQEFNNQITDEFIEDYLKILTGKRKYYHGPGNEKSRTDYGRFRTDGTTLDNIFGVLIGKCTFYPNEYRASKSSYTAQEFNLLNDLNNLTVPTETKKLSEEQKKVIVEYAKEAKTLGASTLLKYIVKMIDASVDQISGYRVDVNNKPEMHTFEVYRKMQSLETISVGELSRNVLDELAHILTLNTEREGIEEAINSKLMGVFSQDQVLELVQFRKNNSSLFSKGWHNFSLKLMMELIPELYETSEEQMTILTRLGKQKSKETSKRTKYIDEKELTEEIYNPVVAKSVRQAIKIINEATKKHGIFDNIVIEMARENNEEDAKKDYIKRQKANQDEKNAAMEKAAFQYNGKKELPGNIFNGHKELATKIRLWHQQGEKCLYTGKTIPISDLIHNQYKYEIDHILPLSLSFDDSLSNKVLVHATANQEKGQRTPFQALDSMDDAWSYREFKSYVKDLKSLSNKKKDYLLTEEDISKIEVKQKFIERNLVDTRYSSRVVLNALQDFYKSHQFDTTISVVRGQFTSQLRRKWGLEKSRETYHHHAVDALIIAASSQLRLWKKQNNPLITYKEGQFIDSQTGEIISLTDDEYKELVFKAPYDHFVDTLHSKTFEDGILFSYQVDSKYNRKISDATIYATRKAKLDKDKSEETYVLGKIKDIYSQAGYDAFIKIYNKDKRKFLMYHKDPQTFEKVIEEILRTYPSKERNDKNKEVPCNPFEKYRQENGPIRKYSKKGNGPEIKCLKYYDNKLGNYIDISPDGSDNQVVLQSLKPWRTDVYFNHQTKKYELMGLKYSDLSFEKGSGKYSISNEKYNSIKRIEGVNEQSEFKFTLYK

SEQ ID NO: 576 - protein, 1139 aa, Streptococcus sp.
  Streptococcus sp. C150
MSDLVLGLDIGIGSVGVGILNKVTGEIIHKNSRIFPAAQAENNLERRTNRQGRRLTRRKKHRRVRLNHLFEESGLITDFTKVSINLNPYQLRVKGLTAELSNEELFIALKNMVKHRGISYLDDASDDGNSSVGDYAQIVKENSKQLETKTPGQIQLERYQKYGQLRGDFTVEEDGRKHRLINVFPTSAYHAEALRILQTQQEFNPQITDEFINSYLEILTGKRKYYHGPGNEKSRTDYGKYTTKKDAQGQYITLNNIFGILIGKCTFYPEEYRAAKASYTAQEFNLLNDLNNLTVPTETKKLSEEQKYQIITYVKNEKAMGPAKLFKYIAKLLSCDVADIKGYRIDKSDKAEIHTFEAYRKMKTLETLDVKKMAREELDKLAYVLTLNTEREGIQEALDHEFADGTFSQEQVDELVQFRKANSSIFGKGWHSFSVKLMMELIPELYATSEEQMTILTRLGKQKTTSSSNKTKYIDEKQLTEEIYNPVVAKSVRQAIKIVNAAIKKYGDFDNIVIEMARETNEDDEKKAIQKIQKANKAEKDAAMRKAANQYNGKAELPHSVFHGHKQLATKIRLWHQQGERCLYTGKTISIHDLINNPNQFEIDHILPLSITFDDSLANKVLVYATANQEKGQRTPYQALDSMDDAWSFRELKAFVRESKALSNKKKEYLLTEEDISKFDVRKKFIERNLVDTRYASRVVLNALQEHFRTHKIDTKVSVVRGQFTSQLRRHWGIEKTRDTYHHHAVDALIIAASSQLNLWKKQKNTLVSYSEDQLLDIETGELISDDEYKESVFKAPYQHFVDTLKSKEFEDSILFSYQVDSKFNRKISDATIYATRKAKLDKEKKEYTYTLGKIKDIYALGTKTPSKTGFYKFLDLYKKDKSQFLMYQKDRRTWDEVIEKILEQYRPFKEKDKNGKEVDFNPFEKYRIENGPIRKYSRKGNGPEIKSLKYYDNLLGRFVDITPSESKNPVALLSLNPWRTDVYYNTETRKYEFLGLKYADLCFEKGGSYGISKVKYNKIREKEGIGKNSEFKFTLYKNDLILIKDTETNRQQIFRFWSRTGKDNPKSFEKHKLELKPYEKTRFEKGEELKVLGKVPPSSNRLQKNMQIENLSIYKVRTDVLGNQHIIKNEGDKPKLDF

SEQ ID NO: 577 - protein, 1377 aa, Streptococcus sp.
  Streptococcus sp. C300
MNNKPYSIGLDIGTNSVGWSVITDDYKVPSKKMKVLGNTDKRFIKKNLIGALLFDEGTTAEARRLKRTARRRYTRRKNRLRYLQEIFAEEMSKVDSSFFHRLDDSFLIPEDKRGSKYPIFATLVEEKEYHKQFPTIYHLRKQLADSKEKADLRLIYLVLAHMIKYRGHFLYEEAFDIKNNDIQKIFNEFISIYDNTFEGSSLSGQNAQVETIFTDKISKSAKRERVLKLFPDEKSTGLFSEFLKLIVGNQADFKKHFDLEEKAPLQFSKDTYDEDLENLLEQIGDDFADLFVAAKKLYDAILLSGILTVTDPSTKAPLSASMIERYENHQKDLAVLKQFIKTNLPEKYVEVFSDQSKDGYAGYIDGKTTQEAFYKYIKNLLSKFDGADYFLDKIEREVFLRKQRTFDNGSIPHQIHLQEMNTILRRQGEHYPFLKENKEKIEKILTFRIPYHVGPLARGNRDFAWLTRNSDQAIRPWNFEEIVDKASSAEDFINKMTNYDLYLPEEKVLPKHSLLYETFAVYNELTKVKFIAEGMRDYQFLDSGQKKKIINQLFKKKRKVTEDDIIDCLQKIDNYDGIELKGIEKQFNASLSTYHDILKIIRDKEFMDDPKNGDILENVIHTLTIFEDREMIKQRLAQYNSIFDEKVIKALSRKHYTGWGKLSAKLIDGIRDKQTGKTILDYLMDDGKSNRNFMQLIKDDELSFTEIIQKAQVVGDTDNLRQVVQNLPGSPAIKKGILQSIKIVDELVKVMGHAPESIVIEMARENQTTARGKKNSQQRYKRIEDSLKNLASGLDSNILKENPTDNIQLQNDRLFLYYLQNGKDMYTGEALNINQLSSYDIDHIIPQAFIKDDSLDNRVLTSSKDNRGKSDNVPSLEVVEKMKAFWQQLLDSKLISERKYNNLTKAERERGGLNELDKVGFIKRQLVETRQITKHVAQILDARFNKEVTEKNKKNRNVKIITLKSNMVSNFRKEFGLYKVREINDYHHAHDAYLNAVVAKAILKKYPKLEPEFVYGDYQKYDLKRYISRSKDPKEVEKATEKYFFYSNLLNFFKEEVHYADGTIVKRENIEYSKDTGEIAWNKEKDFATIKKVLSLPQVNIVKKTEEQTVGQNGGLFDNNIVSKKKVVDASKLIPIKSGLSPEKYGGYARPTIAYSVLVTYKQNNKIKNTMVGIPVLTKLEFERDPNLYLRNLGINNVSHVIKLVKYTVLEFKHKYGTYRRFIVSNQELKRANQIFVTTKQMKLISQYTTLDKNEHDSLLKNNQQLIQSIWNQFLEFMLATDLVNKKQYDELILTNNQTIEECRNIMNRVITTLSFTNINAGQKKIIFDDTLSLPIKRWQFTDSDKMVKKIIESTLIHQSITGLYETRIDLSKLGED

SEQ ID NO: 578 - protein, 1371 aa, Streptococcus sp.
  Streptococcus sp. F0441
MENKNYSIGLDIGTNSVGWSVITDDYKVPSKKMKVLGNTDKHFIKKNLIGALLFDEGTTAEARRLKRTARRRYTRRKNRLRYLQEIFSEEIGKVDSSFFHRLDDSFLIPEDKRGSKYPIFATLAEEKKYHKQFPTIYHLRKQLADSKEKTDLRLIYLALAHMIKYRGHFLYEEAFDIKNNDIQKIFNEFISIYNNTFEGNSLSGQNVQVEAIFTDKISKSAKRERVLKLFPDEKSTGLFSEFLKLIVGNQADFKKHFDLEEKAPLQFSRDTYDEDLENLLGQIGDDFADLFLVAKKLYDAILLSGILTVTNPSTKAPLSASMIERYENHQKDLASLKQFIKNNLPEKYDEVFSDQSEDGYAGYIDGKTTQETFYKYIKNLLSKFEGADYFLDKIEREDFLRKQRTFDNGSIPHQIHLQEMNAILRRQGEHYPFLKENKEKIEKILTFRIPYYVGPLARGNRDFAWLTRNSDQAIRPWNFEEIVDKASSAEDFINKMTNYDLYLPEEKVLPKHSLLYETFAVYNELTKVKFIAEGLRDYQFLDSGQKKQIVTQLFKEKRKVTEKDIIQFLHNVDGYDGIELKGIEKQFNASLSTYHDLLKIIKDKAFMDDAKNEAILENIVHTLTIFEDREMIKQRLAQYDSLFDEKVIKALTRRHYTGWGKLSAKLINGISDKQTGNTILDYLIDDGEINRNFMQLINDDGLSFKEIIQKAQVVGKTNDVKQVVQELPGSPAIKKGILQSIKIVDELVKVMGHAPESIVIEMARENQTTARGKKNSQQRYKRIEDSLKILASGLNSKILKEHPTDNIQLQNDRLFLYYLQNGKDMYTGEALDINQLSSCDIDHIIPQAFIKDDSLDNRVLTSSKDNRGKSDNVPSLEVVDKMKVFWQQLLDSKLISYRKFNNLTKAERGGLNELDKVGFIKRQLVETRQITKHVAQILDARFNKEVTEKDKKNRTVKIITLKSNLVSNFRKEFELYKVREINDYHHAHDAYLNAVVAKAILKKYPKLEPEFVYGDYQKYDLKRYISRSKDPKEIEKATEKYFFYSNLLNFFKEEVHYADGTIVKRENIEYSKDTGEIAWNKEKDFATIKKVLSLPQVNIVKKREVQTGGFSKESILPKGNSDKLIPRKTKDILWDTTKYGGFDSPVIAYSILLIADIEKGKAKKLKTVKTLVGITIMEKDAFEKNPIAFLENKGYHNVCKENILCLPKYSLFELENGRRRLLASAKELQKCNEIVLPVYLTTLLYHSKNVHKLDEPGHLEYIQKHRNEFKDLLNLVSEFSQKYVLADANLEKIKNLYADNEQADIEILANSFINLLTFTALGAPAAFKFFGKDVDRKRYTTVSEILNATLIHQSITGLYETRIDLSKLGED

SEQ ID NO: 579 - protein, 1121 aa, Streptococcus sp.
  Streptococcus sp. GMD6S
MNGLVLGLDIGIASVGVGILEKNSGKIIHANSRLFPAATADNNVERRKNRQARRLHRRKKHRGVRFQDLFEDYGLLTDFSKVSINLNPYRLRVDGLNQQLTNEELFIALKNIVKRRGISYLDDASEDGGTVSSDYGKAVEENRKLLAEQTPGQIQLERFEKYGQVRGDFTVVENGEKRRLINVFSTSAYRKEAERILRKQQEFNSKITDEFIEDCLKILTGKRKYYHGPGNEKSRTDYGRFRTDGTTLDNIFGILIGKCTFYPDEYRASKASYTAQEFNLLNDLNNLTVPTETKKLSEEQKKVIVEYAKEAKTLGASTLLKYIAKMIDASVDQIRGYRVDVNNKPEIHTFEAYRKMQSLETISVGELSRNVLDELAHILTLNTEREGIEEAINTKLKDSFSQDQVLELVQFRKNNSSLFSKGWHNFSLKLMMELIPELYETSEEQMTILTRLGKQKSKEISKRTKYIDEKELTEEIYNPVVAKSVRQAIKIINEATKKHGIFDNIVIEMARENNEEDAKKDYIKRQKANQDEKNAAMEKAAFQYNGKKELPDSIFHGQKELATKIRLWHQQGEKCLYTGKNIPISDLIHNQYKYEIDHILPLSLSFDDSLSNKVLVLATANQEKGQRTPFQALDSMDDAWSYREFKSYVKESKLLGNKKKEYLLTEEDISKIEVKQKFIERNLIDTRYSSRVVLNALQDFYKAHKFDTTISVVRGQFTSQLRRKWGLEKSRETYHHHAVDALIIAASSQLRLWKKQNNPLIAYKEGQFVDSETGEIISLSDDEYKELVFKAPYDHFVDTLSSKTFEDSILFSYQVDSKFNRKISDATIYATRKAKLDKEKSEETYVLGKIKDIYSQAGYDAFIKIYNKDKSKFLMYHKDPQTFEKVIEEILRTYPSKELNDKNKEIPCNPFEKYRQENGPIRKYSKKSNGPEIKSLKYYDNKLGNHIDITPESSDNQVVLQSLKPWRTDVYFNHQTKKYELMGLKYSDLSFEKGSGKYSISNQKYNSIKRIEGIDEQSEFKFTLYKNDLILIKDSENNEQKLFRFNSRNDTAKHYIELKPYDKAKFDGEQELITILGNVAKGGRCLKGLNKSNISIFKVKTDVLGKKHIIKKEGDEPKLKF

SEQ ID NO: 580 - protein, 1375 aa, Streptococcus sp.
  Streptococcus sp. M334
MSNKSYSIGLDIGTNSVGWAVITDDYKVPSKKMKVLGNTDKHFIKKNLIGALLFDEGTTAEDRRLKRTARRRYTRRKNRLRYLQEIFSQEISKVDSSFFHRLDDFFLVPEDKRGSKYPIFATLVEEKEYHKKFPTIYHLRKHLADSKEKTDLRLIYLALAHMIKYRGHFLYEESFDIKNNDIQKIFSEFISIYDNTFEGKSLSGQNAQVEAIFTDKISKSTKRERVLKLFPDEKSTGLFSEFLKLIVGNQADFKKHFDLEEKAPLQFSKDTYDEDLENLLGQIGDDFADLFLVAKKLYDAILLSGILTVKDLSTKAPLSASMIERYENHQKDLAALKQFIQNNLQEKYDEVFSDQSKDGYAGYIDGKTTQEAFYKYIKNLLSKFEGADYFLDKIEREDFLKKQRTFDNGSIPHQIHLQEMNAIIRRQGEHYPFLQENKEKIEKILTFRIPYYVGPLARGNGDFAWLTRNSDQAIRPWNFEEIVDQASSAEDFINKMTNYDLYLPEEKVLPKHSLLYETFAVYNELTKVKFIAEGLTRYQFLDKKQKKDIFDTFFKAENKRKVTEKDIIHYLHNVDGYDGIELKGIEKQFNASLSTYHDLLKIIKDKAFMDDSKNEEILENIIHTLTIFEDREMIKQRLAQYDSLFDEKVIKALTRRHYTGWGKLSAKLINGIRDKKSGKTILDYLIDDGEINRNFMQLIHDDGLSFKEIIQKAQVFGKTNDVKQVVQELPGSPAIKKGILQSIKIVDELVKVMGHAPESIVIEMARENQTTARGKKNSQQRYKRIEDSLKNLASGLDSNILKENPTDNIQLQNDRLFLYYLQNGRDMYTGKPLEINQLSNYDIDHIIPQAFIKDDSLDNRVLTSSKDNRGKSDNVPSLEVVEKMKAFWQQLLDSKLISERKFNNLTKAERERGGLNELDKVGFIKRQLVETRQITKHVAQFLDARFNKEVTEKDKKNRNVKIITLKSNLVSNFRKEFGLYKVREINDYHHAHDAYLNAVLAKAILKKYPKLEPEFVYGDYQKYDLQRYISKSREPKEVEKATQKYFFYSNLLNFFKEEVHYADGTIVKRENIEYSKDTGEIAWNKEKDFATVKKVLSLPQVNIVKKTEVQTGGFSKESILPKGNSDKLIPRKTKEILWDTTKYGGFDSPVIAYSILLIADIEKGKAKKLKTVKTLVGITIMEKATFEKNPITFLENKGYHNVRKENILCLPKYSLFELESGRRRMLASAKELQKGNEIVLPVYLTTLLYHSKNVHKLDEPEHLEYIQKHRYEFKDLLNLVSEFSQKYVLADANLEKIKNLYADNEQADIEILANSFINLLTFTALGAPAAFKFLGKDVDRKRYTTVSEILNATLIHQSITGLYETRIDLSKLGED

SEQ ID NO: 581 - protein, 1371 aa, Streptococcus sp.
  Streptococcus sp. oral taxon 056 str. F0418
MNNNNYSIGLDIGTNSVGWAVITDDYKVPSKKMRVLGNTDKRFIKKNLIGALLFDEGTTAEDRRLKRTARRRYTRRKNRLRYLQEIFAEEMSKVDSSFFHRLDDSFLVPEDKSGSKYPIFATLAEEKEYHKKFPTIYHLRKHLADSKEKADLRLIYLALAHITKYRGHFLYEEAFDIKNNDIQKIFNEFINIYDNTFEGSSLSGQNAQVEAIFTGKISKSVKREHVLKLFPDEKSTGLFSEFLKLIVGNQADFKKHFDLEEKASLQFSKDTYDEDLENLLGQIGDDFADLFLVAKKLYDAILLSGILTVTDPSTKAPLSASMIERYENHQEDLAALKQFIKNNLPEKYAEVFSDQSKDGYAGYIDGKTTQEAFYKYIKNLLSKFEGADYFLDKIEREDFLRKQRTFDNGSIPHQIHLQEMNAILRRQGEHYPLLKENKEKIEKILTFRIPYYVGPLARGNRDFAWLTRNSDQAIRPWNFEEIVDKASSAESFINKMTNYDLYLPEEKVLPKHSLLYETFAVYNELTKVKFIAEGLRDYQFFDSGQKKQIVNQLFKEKRKVTEKDIIHYLHNVDGYDGIELKGIEKQFNASLSTYHDLLKIIKDKEFMDNHKNQEILENIVHTLTIFEDREMIKQRLAQYDSIFDEKVIKALTRRHYTGWGKLSAKLINGICDKKTGKTILDYLIDDGYNNRNFMQLINDDGLSFKEIIQKAQVVGKTDDLTQVVRELSGSPAIKKGILQSIKIVDELVKIMGYAPESIVIEMARENQTTAKGKKNSQQRYKRIEDALKNLAPGLDSTISKENPTDNIQLQNDRLFLYYLQNGKDMYTGEALDINQLSSYDIDHIIPQAFIKDDSLDNRVLTSSKDNRGKSDNVPSLEVVKKRKAFWQQLLDSKLISERKFNNLTKAERGGLDERDKVGFIKRQLVETRQITKHVARILDARFNTEVSEKNQKIRSVKIITLKSNLVSNFRKEFKLYKVREINDYHHAHDAYLNAVVAKAILKKYPKLEPEFVYGDYQKYDLKRYISKSKDPKEVEKATEKYFFYSNLLNFFKEEVHYADGTIVKRENIEYSKDTGEIAWNKEKDFVTIKKVLSYPQVNIVKKREVQTGGFSKESILPKGNSDKLIPRKTKDILWDTTKYGGFDSPVIAYSILLIADIEKGKAKKLKTVKTLVGITIMEKAAFEKNPITFLENKGYHNVRKENILCLPKYSLFELENGRRRLLASAKELQKGNEIVLPVYLTTLLYHSKNVHKLDEPEHLEYIQKHRYEFKDLLNLVSEFSQKYVLAEANLEKIKSLYVDNEQADIEILANSFINLLTFTALGAPAAFKFFGKDVDRKRYTTVSEILNATLIHQSITGLYETRIDLSKLGED

SEQ ID NO: 582 - protein, 1420 aa, Streptococcus sp.
  Streptococcus sp. oral taxon 071 str. 73H25AP
MAKFNKNYSIGLDIGVSSVGYAVVTEDYRVPAFKFKVLGNTEKEKIKKNLIGSTTFVPAQSAQGTRVFRVNRRRIDRRNHRIAYLRDIFQKEIEKIDKNFYRRLDESFRVLGDKSEDIQIKQPFFGNKELETAYHKKYPTIYHLRKHLADADKNSPVADIREVYMVLSHILKYRGHFLTLGKIDPNNINMQNSWIDFIESCQDAFDLEISDESKTIAAIFKSSENRQEKVKQILSYFQQELLKKDKSIFKQLLQLLFGLKTKFKDCFELEEEPDLNFSKENYDENLENLLGALEEDFSDVFAKLKILRDTILLSSMLTYTGATHARFSATMVERYEEHRKDLQRFKSFVKQNLSEQDYLDIFGRKTPTGFDVDKETKGYVGYISNKMVLTNPQKQKTIQQNFYDYISGKITGIEGAECFLNKISDGTFLRKLRTTDNGAIPNQIHAYELEKIIERQGRDYPFLLENKDKLLSILTFKIPYYVGPLAKGNNSRFAWIKRTTSQDVLDDNDEDTRNGKIRPWNYHKLINMDETRDAFIINLIGNDIILLNEKVLPKRSLIYEEVMLQNELTRVKYKDKYGKIHFFNSELRQEIINNLFKTNSKRVSSAMLLSYLENFTNLQAVEIVSGIEKGKSLNSTLKTYNDLKTIFSEELLDSEIYQKELEEIIKVITVFDDKKSIKNYLTKYFGHLEFLNEEKINQLSKLRYTGWGRYSGKLLLGIRDEDTGFNLMQFLRNDDENRNLTQLISDTTLSFDSAIKAIQSKSTVEDDVFEEIKNLAGSPAIKRGILNSIKIVDELVQIIGYPPQNIIIEMARENMTTEEGQKKAKTRKSKLESALKNIEDSVLESGKVPHSDEQLQSEKLYLYYLQNGKDMYSLDKTGSPTPLYRDQLDQYEVDHIIPYSFLPIDSIDNKVLTHRENNQRKLNNIPDKETVANMKPFWEKLYNAKLISQTKYQRLTTSERTPDGVLTESMKAGFIERQLVETRQIIKHVARILDNRFSDTKIITLKSQLVTNFRNTFHIAKIRELNDYHHAHDAYLAVVVGQTLLKAYPKLAPELIYGHHAHFNRHEENKATLRKHLYSNIMRFFNNPDSKVSKDIWDCNRDLPIVKDVIYNSQINFVKRTMIKKGAFYNQNPVGKLNKQIAANNRYPLKTKVSSLDTSIYGGYGPMNSALSIIIIAERFNEKKGKIETVKEFHDIFIIDYEKFNNNPFQFLNNVSEEGFLKKNDLNRVLAFYRISKYSLMQKIDGTRMLFESKSNLHKVTQFKLTKTQNELFFHMKRLLTKSNLMDLKSESAIKESQNFIQTHQNEFDNIADRLSNYSQKMLGETKSLQTLINGYNERPIKQIDNNEETIRYYYDNFIKMFSFVKSGAPKDIINFFNDKYTVPRMRPKPDRKMLDATLIHQSITGLYETRIDLSKLGED

SEQ ID NO: 583 - protein, 1122 aa, Streptococcus suis
  Streptococcus suis 89/1591
MSNGKILGLDIGIASVGVGVIDAQTGEIIHASSRIFPSANAANNAERRTFRGSRRLIRRKKHRIKRLDDLFNDFHINLDGEMSTDNPYVLRVKGLSQKLTVEELYISIKNIMKRRGISYLDDAESDNEAGRSDYAKAIERNRQLLTSKTPGEIQLERLEKYGQLRGNFTIIDEEGQSQQIINVFSTSDYVKEVEKILDCQKMYHKFISDEFCDKLIELLREKRKYYVGPGNEKSRTDYGIYRTDGTTLENLFGILIGKCTFYPDQYRSSRASYTAQEFNFLNDLNNLTVPTETKKLSQEQKEFLVNYAKETSVLGAGKILQQIAKLADCKVEDIRGYRLDNKDKPELHTFETYRAMKGLVPLVDIGVLSREQLDILADILTLNTDFEGIREALKKQLPNVFDEKQVKGLASFRKSKSQLFAKGWHNLSQKIMLEVIPELYATSDEQMTILTRLGKFEKSSVAEYPSSINVDEITDEIYNPVVAKSIRQTIKIINASIKKWGEFDQIVIEMPRDRNEDEEKKRIADGQKANAKEKADSILRAAELYCAGKVLPDYVYNGHNQLATKIRLWYQQGERCIYTGQPISIHDLIHNQNQYEIDHILPLSLTFDDSLSNKVLVLATANQEKAQRTPYNYLKSATSAWSYREFKDYVTKRKGIGKKKCEYLTFEEDINGFEVRSKFIQRNLVDTRYASKVILNALQDYFKISGIQTKVSVVRGQFTSQLRHKWGIEKTRETYHHHAVDALIIAASSQLRLWKKQESPLVVDYQEGRQVDLETGEILELTDEQYKELVYQPPYQGFVNTISSSAFDNEILFSYQVDSKVNRKISDATIYATRNAQLGKDKTEGIYVLGKIKDIYTQAGYEAFLKRYTKDKTSFLMYHKDLDTWEKVIEIILRDYREYDEKGKEIGNPFERYRRENGYVKKYSRKGNGTAIKSLKYYDNKLGNHIDITPENSRNAVVLQSLKPWRTDVYFNKETGKYEFLGIKYSDLSFEKGTGEYGISQEKYDSIKIAEGVAKKSIFKFTLYKQDLLFIKDIENNFGKLLRFTSKNDTSKHYVELKPYDKNKFGTEEPLLPVLGNVAKSGQCIKGLNKSNISIYKVRTDILGYRHFIKQEGEHPQLKFKK

SEQ ID NO: 584 - protein, 1122 aa, Streptococcus suis
MSNGKILGLDIGIASVGVGVIDAQTGEIIHASSRIFPSANAANNAERRTFRGSRRLIRRKKHRIKRLDDLFNDFHINLDGEMSTDNPYVLRVKGLSQKLTVEELYISIKNIMKRRGISYLDDAESDNEAGRSDYAKAIERNRQLLTSKTPGEIQLERLEKYGQLRGNFTIIDEEGQSQQIINVFSTSDYVKEVEKILDCQKMYHKFISDEFCDKLIELLREKRKYYVGPGNEKSRTDYGIYRTDGTTLENLFGILIGKCTFYPDQYRSSRASYTAQEFNFLNDLNNLTVPTETKKLSQEQKEFLVNYAKETSVLGAGKILQQIAKLADCKVEDIRGYRLDNKDKPELHTFETYRAMKGLVPLVDIGVLSREQLDILADILTLNTDFEGIREALKKQLPNVFDEKQVKGLASFRKSKSQLFAKGWHNLSQKIMLEVIPELYATSDEQMTILTRLGKFEKSSVAEYPSSINVDEITDEIYNPVVAKSIRQTIKIINASIKKWDEFDQIVIEMPRDRNEDEEKKRIADGQKANAKEKADSILRAAELYCAGKVLPDYVYNGHNQLATKIRLWYQQGERCIYTGQPISIHDLIHNQNQYEIDHILPLSLTFDDSLSNKVLVLATANQEKAQRTPYNYLKSATSAWSYREFKDYVTKRKGIGKKKCEYLTFEEDINGFEVRSKFIQRNLVDTRYASKVILNALQDYFKISGIQTKVSVVRGQFTSQLRHKWGIEKTRETYHHHAVDALIIAASSQLRLWKKQESPLVVDYQEGRQVDLETGEILELTDEQYKELVYQPPYQGFVNTISSSAFDNEILFSYQVDSKVNRKISDATIYATRNAQLGKDKTEGIYVLGKIKDIYTQAGYEAFLKRYTKDKTSFLMYHKDLDTWEKVIEIILRDYREYDEKGKEIGNPFERYRRENGYVKKYSRKGNGTAIKSLKYYDNKLGNHIDITPENSRNAVVLQSLKPWRTDVYFNKETGKYEFLGIKYSDLSFEKGTGEYGISQEKYDSIKIAEGVAKKSIFKFTLYKQDLLFIKDIENNFGKLLRFTSKNDTSKHYVELKPYDKNKFGTEEPLLPVLGNVAKSGQCIKGLNKSNISIYKVRTDILGYRHFIKQEGEHPQLKFKK

SEQ ID NO: 585 - protein, 1381 aa, Streptococcus suis
MVKKKYAIGIDIGTNSVGWSIVTDDYKVPSKKMKVFGNTEKRYIKKNLLGTLLFDEGNTAENRRLKRTARRRYTRRRNRILYLQEIFAEEINKIDDSFFQRLDDSFLIVEDKQGSKHPIFGTLQEEKEYHKQFPTIYHLRKQLADSSQKADIRLIYLALAHIIKYRGHFLFEGDLKSENKDVQHLFNDFVEMFDKTVEGSYLSENLPNVADVLVEKVSKSRRLENILHYFPNEKKNGLFGNFLALALGLQPNFKTNFELAEDAKIQFSKETYEEDLEELLGKIGDDYADLFIATKSLYDGILLAGILSTTDSTTKAPLSSSMVNRYEEHQKDLALLKNFIHQNLSDSYKEVFNDKLKDGYAGYIEGKTTQENFYRFIKKAIEKIEGSNYFIDKIDREDFLRKQRTFDNGSIPHQIHLQEMHAIIRRQAEFYPFLVENQDKIEKILTFRIPYYVGPLARGKSEFAWLNRKSDEKIRPWNFDEMVDKETSAENFITRMTNYDRYLPDQKVLPKHSLLYEKFAVYNELTKVKFIAEGMRDYQFLDSGQKKDIVKTLFKTKRKVTAKDIKAYLENSNGYAGVELKGLEEQFNASLPTYHDLLKILRDKAFIDAEENQEILEDIVLTLTLFEDREMIRKRLEKYKDILTEEQRKKLERRHYTGWGRLSAKLINGILDKVTRKTILGYLIDDGTSNRNFMQLINDDTLSFVDEIRLAQGSGEAEDYRAEVQNLAGSPAIKKGILQSLKIVDELIEVMGYEPEHIVVEMARENQFTNQGRRNSQQRINRLENALKDFGSKILEEQKPYGVSKVNNIHLQSDRLFLYYLQNGKDMYTDEELDIDHLSEYDIDHIIPQAFIKDDSLDNKVLTKSAKNRGKSDDVPSMEIVHNRKNFWRQLLKSKLISQRKFDNLTKAERGGLTNEDKARFIQRQLVETRQITKHVARMLDTRFNTKLDEAGNRIRDPKVNIITLKSNLVSQFRKDYQLYKIREINNYHHAHDAYINAVVATALLKKYPQLAPEFVYGEYPTYNSYNSRKSATEKVLFYSNIMNFFKRIVVHSKTGEVRIRPVIEVNKETGEIVWDKKSDFRTVRKVLSYPQVNVVKKTEVQNHGLDRGKPKGFYNANLSPRPKEGSVENLVPAKQSFDTKRYGGYAGISNSYAVLVNGIIEKGKKKSKAEVTEFQGISILARKDFDKNPKQYLLNLGYKDIKSIIKLPKYSLFELENGSRRMLASILSTNNKRGEIHKGNEMYLPDKFVTLLYHAMRVNRTLEPGHKKYVETHRHVFDELLIYILEYNEKIVGAKANGKRIVEAYSARKDTDNLEELCNSFINLLNLTALGSAVDFEFLGTKIPRYRDYTPSSLLKATLIHQSVTGLYETRIDLSKLGGD

SEQ ID NO: 586 - protein, 1122 aa, Streptococcus suis; identical to SEQ ID NO: 583

SEQ ID NO: 587 - protein, 1388 aa, Streptococcus thermophilus
MTKPYSIGLDIGTNSVGWAVITDNYKVPSKKMKVLGNTSKKYIKKNLLGVLLFDSGITAEGRRLKRTARRRYTRRRNRILYLQEIFSTEMATLDDAFFQRLDDSFLVPDDKRDSKYPIFGNLVEEKVYHDEFPTIYHLRKYLADSTKKADLRLVYLALAHMIKYRGHFLIEGEFNSKNNDIQKNFQDFLDTYNAIFESDLSLENSKQLEEIVKDKISKLEKKDRILKLFPGEKNSGIFSEFLKLIVGNQADFRKCFNLDEKASLHFSKESYDEDLETLLGYIGDDYSDVFLKAKKLYDAILLSGFLTVTDNETEAPLSSAMIKRYNEHKEDLALLKEYIRNISLKTYNEVFKDDTKNGYAGYIDGKTNQEDFYVYLKNLLAEFEGADYFLEKIDREDFLRKQRTFDNGSIPYQIHLQEMRAILDKQAKFYPFLAKNKERIEKILTFRIPYYVGPLARGNSDFAWSIRKRNEKITPWNFEDVIDKESSAEAFINRMTSFDLYLPEEKVLPKHSLLYETFNVYNELTKVRFIAESMRDYQFLDSKQKKDIVRLYFKDKRKVTDKDIIEYLHAIYGYDGIELKGIEKQFNSSLSTYHDLLNIINDKEFLDDSSNEAIIEEIIHTLTIFEDREMIKQRLSKFENIFDKSVLKKLSRRHYTGWGKLSAKLINGIRDEKSGNTILDYLIDDGISNRNFMQLIHDDALSFKKKIQKAQIIGDEDKGNIKEVVKSLPGSPAIKKGILQSIKIVDELVKVMGGRKPESIVVEMARENQYTNQGKSNSQQRLKRLEKSLKELGSKILKENIPAKLSKIDNNALQNDRLYLYYLQNGKDMYTGDDLDIDRLSNYDIDHIIPQAFLKDNSIDNKVLVSSASNRGKSDDFPSLEVVKKRKTFWYQLLKSKLISQRKFDNLTKAERGGLLPEDKAGFIQRQLVETRQITKHVARLLDEKFNNKKDENNRAVRTVKIITLKSTLVSQFRKDFELYKVREINDFHHAHDAYLNAVIASALLKKYPKLEPEFVYGDYPKYNSFRERKSATEKVYFYSNIMNIFKKSISLADGRVIERPLIEVNEETGESVWNKESDLATVRRVLSYPQVNVVKKVEEQNHGLDRGKPKGLFNANLSSKPKPNSNENLVGAKEYLDPKKYGGYAGISNSFAVLVKGTIEKGAKKKITNVLEFQGISILDRINYRKDKLNFLLEKGYKDIELIIELPKYSLFELSDGSRRMLASILSTNNKRGEIHKGNQIFLSQKFVKLLYHAKRISNTINENHRKYVENHKKEFEELFYYILEFNENYVGAKKNGKLLNSAFQSWQNHSIDELCSSFIGPTGSERKGLFELTSRGSAADFEFLGVKIPRYRDYTPSSLLKDATLIHQSVTGLYETRIDLAKLGEG

SEQ ID NO: 588 - protein, 1128 aa, Streptococcus thermophilus
MSDLVLGLDIGIGSVGVGILNKVTGEIIHKNSRIFPAAQAENNLVRRTNRQGRRLTRRKKHRIVRLNRLFEESGLITDFTKISINLNPYQLRVKGLTDELSNEELFIALKNMVKHRGISYLDDASDDGNSSVGDYAQIVKENSKQLETKTPGQIQLERYQTYGQLRGDFTVEKDGKKHRLINVFPTSAYRSEALRILQTQQEFNPQITDEFINRYLEILTGKRKYYHGPGNEKSRTDYGRYRTSGETLDNIFGILIGKCTFYPEEFRAAKASYTAQEFNLLNDLNNLTVPTETKKLSKEQKNQIINYVKNEKAMGPAKLFKYIAKLLSCDVADIKGYRIDKSGKAEIHTFEAYRKMKTLETLDIEQMDRETLDKLAYVLTLNTEREGIQEALEHEFADGSFSQKQVDELVQFRKANSSIFGKGWHNFSVKLMMELIPELYETSEEQMTILTRLGKQKRLRLQIKQNISNKTKYIDEKLLTEEIYNPVVAKSVRQAIKIVNAAIKEYGDFDNIVIEMARETNEDDEKKAIQKIQKANKDEKDAAMLKAANQYNGKAELPHSVFHGHKQLATKIRLWHQQGERCLYTGKTISIHDLINNPNQFEVDHILPLSITFDDSLANKVLVYATANQEKGQRTPYQALDSMDDAWSFRELKAFVRESKTLSNKKKEYLLTEEDISKFDVRKKFIERNLVDTRYASRVVLNALQEHFRAHKIDTKVSVVRGQFTSQLRRHWGIEKTRDTYHHHAVDALIIAASSQLNLWKKQKNTLVSYSEEQLLDIETGELISDDEYKESVFKAPYQHFVDTLKSKEFEDSILFSYQVDSKFNRKISDATIYATRQAKVGKDKKDETYVLGKIKDIYTQDGYDAFMKIYKKDKSKFLMYRHDPQTFEKVIEPILENYPNKQMNEKGKEVPCNPFLKYKEEHGYIRKYSKKGNGPEIKSLKYYDSKLLGNPIDITPENSKNKVVLQSLKPWRTDVYFNKATGKYEILGLKYADLQFEKGTGTYKISQEKYNDIKKKEGVDSDSEFKFTLYKNDLLLVKDTETKEQQLFRFLSRTLPKQKHYVELKPYDKQKFEGGEALIKVLGNVANGGQCIKGLAKSNISIYKVRTDVLGNQHIIKNEGDKPKLDF

SEQ ID NO: 589 - protein, 1121 aa, Streptococcus thermophilus
MSDLVLGLDIGIGSVGVGILNKVTGEIIHKNSRIFPAAQAENNLVRRTNRQGRRLTRRKKHRIVRLNRLFEESGLITDFTKISINLNPYQLRVKGLTDELSNEELFIALKNMVKHRGISYLDDASDDGNSSVGDYAQIVKENSKQLETKTPGQIQLERYQTYGQLRGDFTVEKDGKKHRLINVFPTSAYRSEALRILQTQQEFNPQITDEFINRYLEILTGKRKYYHGPGNEKSRTDYGRYRTSGETLDNIFGILIGKCTFYPDEFRAAKASYTAQEFNLLNDLNNLTVPTETKKLSKEQKNQIINYVKNEKAMGPAKLFKYIAKLLSCDVADIKEYRIDKSGKAEIHTFEAYRKMKTLETLDIEQMDRETLDKLAYVLTLNTEREGIQEALEHEFADGSFSQKQVDELVQFRKANSSIFGKGWHNFSVKLMMELIPELYETSEEQMTILTRLGKQKTTSSSNKTKYIDEKLLTEEIYNPVVAKSVRQAIKIVNAAIKEYGDFDNIVIEMARETNEDDEKKAIQKIQKANKDEKDAAMLKAANQYNGKAELPHSVFHGHKQLATKIRLWHQQGERCLYTGKTISIHDLINNSNQFEVDHILPLSITFDDSLANKVLVYATANQEKGQRTPYQALDSMDDAWSFRELKAFVRESKTLSNKKKEYLLTEEDISKFDVRKKFIERNLVDTRYASRVVLNALQEHFRAHKIDTKVSVVRGQFTSQLRRHWGIEKTRDTYHHHAVDALIIAASIQLNLWKKQKNTLVSYSEDQLLDIETGELISDDEYKESVFKAPYQHFVDTLKSKEFEDSILFSYQVDSKFNRKISDATIYATRQAKVGKDKADETYVLGKIKDIYTQDGYDAFMKIYKKDKSKFLMYRHDPQTFEKVIEPILENYPNKQINEKGKEVPVNPFLKYKEEHGYIRKYSKKGNGPEIKSLKYYDSKLGNHIDITPKDSNNKVVLQSVSPWRADVYFNKTTGKYEILGLKYADLQFEKGTGTYKISQEKYNDIKKKEGVDSDSEFKFTLYKNDLLLVKDTETKEQQLFRFLSRTMPKQKHYVELKPYDKQKFEGGEALIKVLGNVANSGQCKKGLGKSNISIYKVRTDVLGNQHIIKNEGDKPKLDF

SEQ ID NO: 590 - protein, 1388 aa, Streptococcus thermophilus
MTKPYSIGLDIGTNSVGWAVTTDNYKVPSKKMKVLGNTSKKYIKKNLLGVLLFDSGITAEGRRLKRTARRRYTRRRNRILYLQEIFSTEMATLDDAFFQRLDDSFLVPDDKRDSKYPIFGNLVEEKAYHDEFPTIYHLRKYLADSTKKADLRLVYLALAHMIKYRGHFLIEGEFNSKNNDIQKNFQDFLDTYNAIFESDLSLENSKQLEEIVKDKISKLEKKDRILKLFPGEKNSGIFSEFLKLIVGNQADFRKCFNLDEKASLHFSKESYDEDLETLLGYIGDDYSDVFLKAKKLYDAILLSGFLTVTDNETEAPLSSAMIKRYNEHKEDLALLKEYIRNISLKTYNEVFKDDTKNGYAGYIDGKTNQEDFYVYLKKLLAEFEGADYFLEKIDREDFLRKQRTFDNGSIPYQIHLQEMRAILDKQAKFYPFLAKNKERIEKILTFRIPYYVGPLARGNSDFAWSIRKRNEKITPWNFEDVIDKESSAEAFINRMTSFDLYLPEEKVLPKHSLLYETFNVYNELTKVRFIAESMRDYQFLDSKQKKDIVRLYFKDKRKVTDKDIIEYLHAIYGYDGIELKGIEKQFNSSLSTYHDLLNIINDKEFLDDSSNEAIIEEIIHTLTIFEDREMIKQRLSKFENIFDKSVLKKLSRRHYTGWGKLSAKLINGIRDEKSGNTILDYLIDDGISNRNFMQLIHDDALSFKKKIQKAQIIGDEDKGNIKEVVKSLPGSPAIKKGILQSIKIVDELVKVMGGRKPESIVVEMARENQYTNQGKSNSQQRLKRLEKSLKELGSKILKENIPAKLSKIDNNALQNDRLYLYYLQNGKDMYTGDDLDIDRLSNYDIDHIIPQAFLKDNSIDNKVLVSSASNRGKSDDVPSLEVVKKRKTFWYQLLKSKLISQRKFDNLTKAERGGLSPEDKAGFIQRQLVETRQITKHVARLLDEKFNNKKDENNRAVRTVKIITLKSTLVSQFRKDFELYKVREINDFHHAHDAYLNAVVASALLKKYPKLEPEFVYGDYPKYNSFRERKSATEKVYFYSNIMNIFKKSISLADGRVIERPLIEVNEETGESVWNKESDLATVRRVLSYPQVNVVKKVEEQNHGLDRGKPKGLFNANLSSKPKPNSNENLVGAKEYLDPKKYGGYAGISNSFTVLVKGTIEKGAKKKITNVLEFQGISILDRINYRKDKLNFLLEKGYKDIELIIELPKYSLFELSDGSRRMLASILSTNNKRGEIHKGNQIFLSQKFVKLLYHAKRISNTINENHRKYVENHKKEFEELFYYILEFNENYVGAKKNGKLLNSAFQSWQNHSIDELCSSFIGPTGSERKGLFELTSRGSAADFEFLGVKIPRYRDYTPSSLLKDATLIHQSVTGLYETRIDLAKLGEG

SEQ ID NO: 591 - protein, 1121 aa, Streptococcus thermophilus
MSDLVLGLDIGIGSVGVGILNKVTGEIIHKNSRIFPAAQAENNLVRRTNRQGRRLARRKKHRRVRLNRLFEESGLITDFTKISINLNPYQLRVKGLTDELSNEELFIALKNMVKHRGISYLDDASDDGNSSVGDYAQIVKENSKQLETKTPGQIQLERYQTYGQLRGDFTVEKDGKKHRLINVFPTSAYRSEALRILQTQQEFNPQITDEFINRYLEILTGKRKYYHGPGNEKSRTDYGRYRTSGETLDNIFGILIGKCTFYPDEFRAAKASYTAQEFNLLNDLNNLTVPTETKKLSKEQKNQIINYVKNEKAMGPAKLFKYIAKLLSCDVADIKGYRIDKSGKAEIHTFEAYRKMKTLETLDIEQMDRETLDKLAYVLTLNTEREGIQEALEHEFADGSFSQKQVDELVQFRKANSSIFGKGWHNFSVKLMMELIPELYETSEEQMTILTRLGKQKTTSSSNKTKYIDEKLLTEEIYNPVVAKSVRQAIKIVNAAIKEYGDFDNIVIEMARETNEDDEKKAIQKIQKANKDEKDAAMLKAANQYNGKAELPHSVFHGHKQLATKIRLWHQQGERCLYTGKTISIHDLINNSNQFEVDHILPLSITFDDSLANKVLVYATANQEKGQRTPYQALDSMDDAWSFRELKAFVRESKTLSNKKKEYLLTEEDISKFDVRKKFIERNLVDTRYASRVVLNALQEHFRAHKIDTKVSVVRGQFTSQLRRHWGIEKTRDTYHHHAVDALIIAASSQLNLWKKQKNTLVSYSEDQLLDIETGELISDDEYKESVFKAPYQHFVDTLKSKEFEDSILFSYQVDSKFNRKISDATIYATRQAKVGKDKADETYVLGKIKDIYTQDGYDAFMKIYKKDKSKFLMYRHDPQTFEKVIEPILENYPNKQINEKGKEVPCNPFLKYKEEHGYIRKYSKKGNGPEIKSLKYYDSKLGNHIDITPKDSNNKVVLQSVSPWRADVYFNKTTGKYEILGLKYADLQFEKGTGTYKISQEKYNDIKKKEGVDSDSEFKFTLYKNDLLLVKDTETKEQQLFRFLSRTMPKQKHYVELKPYDKQKFEGGEALIKVLGNVANSGQCKKGLGKSNISIYKVRTDVLGNQHIIKNEGDKPKLDF

SEQ ID NO: 592 - protein, 1122 aa, Streptococcus thermophilus
MSDLVLGLDIGIGSVGVGILNKVTGEIIHKNSRIFPAAQAENNLVRRTNRQGRRLTRRKKHRIVRLNRLFEESGLITDFTKISINLNPYQLRVKGLTDELSNEELFIALKNMVKHRGISYLDDASDDGNSSVGDYAQIVKENSKQLETKTPGQIQLERYQTYGQLRGDFTVEKDGKKHRLINVFPTSAYRSEALRILQTQQEFNSQITDEFINRYLEILTGKRKYYHGPGNEKSRTDYGRYRTNGETLDNIFGILIGKCTFYPDEFRAAKASYTAQEFNLLNDLNNLTVPTETKKLSKEQKNQIINYVKNEKVMGPAKLFKYIAKLLSCDVADIKGHRIDKSGKAEIHTFEAYRKMKTLETLDIEQMDRETLDKLAYVLTLNTEREGIQEALEHEFADGSFSQKQVDELVQFRKANSSIFGKGWHNFSVKLMMELIPELYETSEEQMTILTRLGKQKTTSSSNKTKYIDEKLLTEEIYNPVVAKSVRQAIKIVNAAIKEYGDFDNIVIEMARETNEDDEKKAIQKIQKANKDEKDAAMLKAANQYNGKAELPHSVFHGHKQLATKIRLWHQQGERCLYTGKTISIHDLINNPNQFEVDHILPLSITFDDSLANKVLVYATANQEKGQRTPYQALDSMDDAWSFRELKAFVRESKTLSNKKKEYLLTEEDISKFDVRKKFIERNLVDTRYASRVVLNALQEHFRAHKIDTKVSVVRGQFTSQLRRHWGIEKTRDTYHHHAVDALIIAASSQLNLWKKQKNTLVSYSEEQLLDIETGELISDDEYKESVFKAPYQHFVDTLKSKEFEDSILFSYQVDSKFNRKISDATIYATRQAKVGKDKKDETYVLGKIKDIYTQDGYDAFMKIYKKDKSKFLMYRHDPQTFEKVIEPILENYPNKEMNEKGKEVPCNPFLKYKEEHGYIRKYSKKGNGPEIKSLKYYDSKLLGNPIDITPENSKNKVVLQSLKPWRTDVYFNKNTGKYEILGLKYADLQFEKKTGTYKISQEKYNGIMKEEGVDSDSEFKFTLYKNDLLLVKDTETKEQQLFRFLSRTMPNVKYYVELKPYSKDKFEKNESLIEILGSADKSGRCIKGLGKSNISIYKVRTDVLGNQHIIKNEGDKPKLDF

SEQ ID NO: 593 - protein, 1388 aa, Streptococcus thermophilus
MTKPYSIGLDIGTNSVGWAVITDNYKVPSKKMKVLGNTSKKYIKKNLLGVLLFDSGITAEGRRLKRTARRRYTRRRNRILYLQEIFSTEMATLDDAFFQRLDDSFLVPDDKRDSKYPIFGNLVEEKAYHDEFPTIYHLRKYLADSTKKADLRLVYLALAHMIKYRGHFLIEGEFNSKNNDIQKNFQDFLDTYNAIFESDLSLENSKQLEEIVKDKISKLEKKDRILKLFPGEKNSGIFSEFLKLIVGNQADFRKCFNLDEKASLHFSKESYDEDLETLLGYIGDDYSDVFLKAKKLYDAILLSGFLTVTDNETEAPLSSAMIKRYNEHKEDLALLKEYIRNISLKTYNEVFKDDTKNGYAGYIDGKTNQEDFYVYLKNLLAEFEGADYFLEKIDREDFLRKQRTFDNGSIPYQIHLQEMRAILDKQAKFYPFLAKNKERIEKILTFRIPYYVGPLARGNSDFAWSIRKRNEKITPWNFEDVIDKESSAEAFINRMTSFDLYLPEEKVLPKHSLLYETFNVYNELTKVRFIAESMRDYQFLDSKQKKDIVRLYFKDKRKVTDKDIIEYLHAIYGYDGIELKGIEKQFNSSLSTYHDLLNIINDKEFLDDSSNEAIIEEIIHTLTIFEDREMIKQRLSKFENIFDKSVLKKLSRRHYTGWGKLSAKLINGIRDEKSGNTILDYLIDDGISNRNFMQLIHDDALSFKKKIQKAQIIGDEDKGNIKEVVKSLPGSPAIKKGILQSIKIVDELVKVMGGRKPESIVVEMARENQYTNQGKSNSQQRLKRLEKSLKELGSKILKENIPAKLSKIDNNALQNDRLYLYYLQNGKDMYTGDDLDIDRLSNYDIDHIIPQAFLKDNSIDNKVLVSSASNRGKSDDFPSLEVVKKRKTFWYQLLKSKLISQRKFDNLTKAERGGLLPEDKAGFIQRQLVETRQITKHVARLLDEKFNNKKDENNRAVRTVKIITLKSTLVSQFRKDFELYKVREINDFHHAHDAYLNAVIASALLKKYPKLEPEFVYGDYPKYNSFRERKSATEKVYFYSNIMNIFKKSISLADGRVIERPLIEVNEETGESVWNKESDLATVRRVLSYPQVNVVKKVEEQNHGLDRGKPKGLFNANLSSKPKPNSNENLVGAKEYLDPKKYGGYAGISNSFAVLVKGTIEKGAKKKITNVLEFQGISILDRINYRKDKLNFLLEKGYKDIELIIELPKYSLFELSDGSRRMLASILSTNNKRGEIHKGNQIFLSQKFVKLLYHAKRISNTINENHRKYVENHKKEFEELFYYILEFNENYVGAKKNGKLLNSAFQSWQNHSIDELCSSFIGPTGSERKGLFELTSRGSAADFEFLGVKIPRYRDYTPSSLLKDATLIHQSVTGLYETRIDLAKLGEG

SEQ ID NO: 594 - protein, 1121 aa, Streptococcus thermophilus
MSDLVLGLDIGIGSVGVGILNKVTGEIIHKNSRIFPAAQAENNLVRRTNRQGRRLTRRKKHRRVRLNRLFEESGLITDFTKISINLNPYQLRVKGLTDELSNEELFIALKNMVKHRGISYLDDASDDGNSSVGDYAQIVKENSKQLETKTPGQIQLERYQTYGQLRGDFTVEKDGKKHRLINVFPTSAYRSEALRILQTQQEFNPQITDEFVNRYLEILTGKRKYYHGPGNEKSRTDYGRYRTNGETLDNIFGILIGKCTFYPEEFRAAKASYTAQEFNLLNDLNNLTVPTETKKLSKEQKNQIINYVKNEKAMGPAKLFKYIAKLLSCDVADIKGYRIDKSGKAEIHTFEAYRKMKTLETLDIEQMDRETLDKLAYVLTLNTEREGIQEALEHEFADGSFSQKQVDELVQFRKANSSIFGKGWHNFSVKLMMELIPELYETSEEQMTILKRLGKQKTTSSSNKTKYIDEKLLTEEIYNPVVAKSIRQAIKIVNAAIKEYGDFDNIVIEMARETNEDDEKKAIQKIQKANKDEKDAAMLKAANQYNGKAELPHSVFHGHKQLATKIRLWHQQGERCLYTGKTISIHDLINNPNQFEVDHILPLSITFDDSLANKVLVYATANQEKGQRTPYQALDSMDDAWSFRELKAFVRESKTLSNKKKEYLLTEEDISKFDVRKKFIERNLVDTRYASRVVLNALQEHFRAHKIDTKVSVVRGQFTSQLRRHWGIEKTRDTYHHHAVDALIIAASSQLNLWKKQKNTLVSYSEDQLLDIETGELISDDEYKESVFKAPYQHFVDTLKSKEFEDSILFSYQVDSKFNRKISDATIYATRQAKVGKDKKDETYVLGKIKDIYTQDGYDAFMKIYKKDKSKFLMYRHDPQTFEKVIEPILENYPNKEMNEKGKEVPCNPFLKYKEEHGYIRKYSKKGNDPEIKSLKYYDSKLGNHIDITPKDSNNKVVLQSVSPWRADVYFNKTTGKYEILGLKYADLQFEKGTGTYKISQEKYNDIKKKEGVDSDSEFKFTLYKNDLLLVKDTETKEQQLFRFLSRTMPKQKHYVELKPYDKQKFEGGEALIKVLGNVANSGQCKKGLGKSNISIYKVRTDVLGNQHIIKNEGDKPKLDF

SEQ ID NO: 595 - protein, 1122 aa, Streptococcus thermophilus
  Streptococcus thermophilus MTCC 5460
MSDLVLGLDIGIGSVGVGILNKVTGEIIHKNSRIFPAAQAENNVERRTNRQGRRLTRRKKHRRVRLNRLFEESGLITDFTKISINLNPYQLRVRGLTDELSNEELFIALKNMVKHRGISYLDDASDDGNSSVGDYAQIVKENSKQLETKTPGQIQLERYQTYGQLRGDFTVEKDGKKHRLINVFPTSAYRSEALRILQTQQEFNSQITDEFINRYLEILTGKRKYYHGPGNEKSRTDYGRYRTSGETLDNIFGILIGKCTFYPEEFRAAKASYTAQEFNLLNDLNNLTVPTETKKLSKEQKNQIINYVKNEKAMGPAKLFKYIAKLLSCDVADIKGYRIDKSGKAEIHTFEAYRKMKTLETLDIEQMDRETLDKLAYVLTLNTEREGIQEALEHEFADGSFSQKQVDELVQFRKASSSIFGKGWHNFSVKLMMELIPELYETSEEQMTILTRLGKQKTTSSSNKTKYIDEKLLTEEIYNPVVAKSVRQAIKIVNAAIKEYGDFDNIVIEMARETNEDDEKKAIQKIQKANKDEKDAAMLKAANQYNGKAELPHSVFHGHKQLATKIRLWHQQGERCLYTGKTISIHDLINNPNQFEVDHILPLSITFDDSLANKVLVYATANQEKGQRTPYQALDSMDDAWSFRELKAFVRESKTLSNKKKEYLLTEEDISKFDVRKKFIERNLVDTRYASRVVLNALQEHFRAHKIDTKVSVVRGQFTSQLRRHWGIEKTRDTYHHHAVDALIIAASSQLNLWKKQKNTLVSYSEDQLLDIETGELISDDEYKESVFKAPYQHFVDTLKSKEFEDSILFSYQVDSKFNRKLSDATIYATRQAKVGKDKKDETYVLGKIKDIYTQDGYDAFMKIYKKDKSKFLMYRHDPQTFEKVIEPILENYPNKEMNEKGKEVPCNPFLKYKEEHGYIRKYSKKGNGPEIKSLKYYDSKLLGNPIDITPENSKNKVVLQSLKPWRADVYFNKTTGKYEILGLKYADLQFEKKTGTYKISQEKYNGIMKEEGVDSDSEFKFTLYKNDLLLVKDTETKEQQLFRFLSRTMPNVKYYVELKPYSKDKFEKNESLIEILGSADKSGRCIKGLGKSNISIYKVRTDVLGNQHIIKNEGDKPKLDF

SEQ ID NO: 596 - protein, 1121 aa, Streptococcus thermophilus
MSDLVLGLDIGIGSVGVGILNKVTGEIIHKNSRIFPAAQAENNLVRRTNRQGRRLTRRKKHRIVRLNRLFEESGLITDFTKISINLNPYQLRVKGLTDELSNEELFIALKNMVKHRGISYLDDASDDGNSSVGDYAQIVKENSKQLETKTPGQIQLERYQTYGQLRGDFTVEKDGKKHRLINVFPTSAYRSEALRILQTQQEFNPQITDEFINRYLEILTGKRKYYHGPGNEKSRTDYGRYRTSGETLDNIFGILIGKCTFYPDEFRAAKASYTAQEFNLLNDLNNLTVPTETKKLSKEQKNQIINYVKNEKAMGPAKLFKYIAKLLSCDVADIKGYRIDKSGKAEIHTFEAYRKMKTLETLDIEQMDRETLDKLAYVLTLNTEREGIQEALEHEFADGSFSQKQVDELVQFRKANSSIFGKGWHNFSVKLMMELIPELYETSEEQMTILTRLGKQKTTSSSNKTKYIDEKLLTEEIYNPVVAKSVRQAIKIVNAAIKEYGDFDNIVIEMARETNEDDEKKAIQKIQKANKDEKDAAMLKAANQYNGKAELPHSVFHGHKQLATKIRLWHQQGERCLYTGKTISIHDLINNSNQFEVDHILPLSITFDDSLANKVLVYATANQEKGQRTPYQALDSMDDAWSFRELKAFVRESKTLSNKKKEYLLTEEDISKFDVRKKFIERNLVDTRYASRVVLNALQEHFRAHKIDTKVSVVRGQFTSQLRRHWGIEKTRDTYHHHAVDALIIAASSQLNLWKKQKNTLVSYSEDQLLDIETGELISDDEYKESVFKAPYQHFVDTLKSKEFEDSILFSYQVDSKFNRKISDATIYATRQAKVGKDKADETYVLGKIKDIYTQDGYDAFMKIYKKDKSKFLMYRHDPQTFEKVIEPILENYPNKQMNEKGKEVPCNPFLKYKEEHGYIRKYSKKGNGPEIKSLKYYDSKLGNHIDITPKDSNNKVVLQSVSPWRADIYFNNTTGKYEILGLKYADLQFEKGTGTYKISQEKYNDIKKKEGVDSDSEFKFTLYKNDLLLVKETETKEQQLFRFLSRTMPKQKHYVELKPYDKQKFEGGEALIKVLGNVANGGQCIKGLGKSNISIYKVRTDVLGNQHIIKNEGDKPKLDF

SEQ ID NO: 597 - protein, 1388 aa, Streptococcus thermophilus
MTKPYSIGLDIGTNSVGWAVITDNYKVPSKKMKVLGNTSKKYIKKNLLGVLLFDSGITAEGRRLKRTARRRYTRRRNRILYLQEIFSTEMATLDDAFFQRLDDSFLVPDDKRDSKYPIFGNLVEEKAYHDEFPTIYHLRKYLADSTKKADLRLVYLALAHMIKYRGHFLIEGEFNSKNNDIQKNFQDFLDTYNAIFESDLSLENSKQLEEIVKDKISKLEKKDRILKLFPGEKNSGIFSEFLKLIVGNQADFRKCFNLDEKASLHFSKESYDEDLETLLGYIGDDYSDVFLKAKKLYDAILLSGFLTVTDNETEAPLSSAMIKRYNEHKEDLALLKEYIRNISLKTYNEVFKDDTKNGYAGYIDGKTNQEDFYVYLKNLLAEFEGADYFLEKIDREDFLRKQRTFDNGSIPYQIHLQEMRAILDKQAKFYPFLAKNKERIEKILTFRIPYYVGPLARGNSDFAWSIRKRNEKITPWNFEDVIDKESSAEAFINRMTSFDLYLPEEKVLPKHSLLYETFNVYNELTKVRFIAESMRDYQFLDSKQKKDIVRLYFKDKRKVTDKDIIEYLHAIYGYDGIELKGIEKQFNSSLSTYHDLLNIINDKEFLDDSSNEAIIEEIIHTLTIFEDREMIKQRLSKFENIFDKSVLKKLSRRHYTGWGKLSAKLINGIRDEKSGNTILDYLIDDGISNRNFMQLIHDDALSFKKKIQKAQIIGDEDKGNIKEVVKSLPGSPAIKKGILQSIKIVDELVKVMGGRKPESIVVEMARENQYTNQGKSNSQQRLKRLEKSLKELGSKILKENIPAKLSKIDNNALQNDRLYLYYLQNGKDMYTGDDLDIDRLSNYDIDHIIPQAFLKDNSIDNKVLVSSASNRGKSDDFPSLEVVKKRKTFWYQLLKSKLISQRKFDNLTKAERGGLLPEDKAGFIQRQLVETRQITKHVARLLDEKFNNKKDENNRAVRTVKIITLKSTLVSQFRKDFELYKVCEINDFHHAHDAYLNAVIASALLKKYPKLEPEFVYGDYPKYNSFRERKSATEKVYFYSNIMNIFKKSISLADGRVIERPLIEVNEETGESVWNKESDLATVRRVLSYPQVNVVKKVEEQNHGLDRGKPKGLFNANLSSKPKPNSNENLVGAKEYLDPKKYGGYAGISNSFAVLVKGTIEKGAKKKITNVLEFQGISILDRINYRKDKLNFLLEKGYKDIELIIELPKYSLFELSDGSRRMLASILSTNNKRGEIHKGNQIFLSQKFVKLLYHAKRISNTINENHRKYVENHKKEFEELFYYILEFNENYVGAKKNGKLLNSAFQSWQNHSIDELCSSFIGPTGSERKGLFELTSRGSAADFEFLGVKIPRYRDYTPSSLLKDATLIHQSVTGLYETRIDLAKLGEG

SEQ ID NO: 598 - protein, 1128 aa, Streptococcus vestibularis
  Streptococcus vestibularis ATCC 49124
MSDLVLGLDIGIGSVGVGILNKVTGEIIHKNSRIFPAAQAENNVERRTNRQGRRLTRRKKHRRVRLNHLFEESGLITDFTKVSINLNPYQLRVKGLIDELSNEELFIALKNMVKHRGISYLDDASDDGNSSVGDYAQIVKENSKQLETKTPGQIQLERYQKYGQLRGDFTVEEDGKKHRLINVFPTSAYRSEALRILQTQKEFNPQITDEFINRYLEILTGKRKYYHGPGNEKSRTDYGRYTTKKDSENEYITLDNIFGILIGKCTFYPEEYRAAKASYTAQEFNLLNDLNNLTVPTETKKLSEEQKNQIINYVKNEKAMGPAKLFKYIAKLLSCDVADIKGYRIDKSDKAEIHTFEAYRKMKTLETIDFEKMSRDQLDKLAYVLTLNTEREGIQEALDHEFADGNFSQEQIDELVQFRKANSSIFGKGWHNFSVKLMMELIPELYATSEEQMTILTRLGKQKTTSSSNKTKYIDEKLLTEEIYNPVVAKSVRQAIKIVNAAIKEYGDFDNIVIEMARETNEDDEKKAIQKIQKANKDEKDAAMLKAANQYNGRAELPHSVFHGHKQLATKIRLWHQQGERCLYTGKTISIHDLINNPNQFEIDHILPLSITFDDSLANKVLVYATANQEKGQRTPYQALDSMDDAWSFRELKAFVRESKSLSNKKKEYLLTEEDISRFDVRKKFIERNLVDTRYASRVVLNALQEHFRAHKTDTKVSVVRGQFTSQLRRHWGIEKTRDTYHHHAVDALIIAASSQLNLWKKQKNTLVNYSENQLLDIETGELISDDEYKESVFKAPYQHFVDTLKSKEFEDSILFSYQVDSKFNRKISDATIYATRQAKVGKDKKDETYVLGKIKDIYSQTGYDAFIKIYQKDKSKFLMYRHDPQTFEKVIEPILENYPNKEMNEKGKEVPCNPFLKYKEEHGDYIRKYSKKGNGPEIKSLKYYDSKLGNHIDITPKDSNNKVVLQSVSPWRADVYFNKTTGKYEILGLKYADLQFEKGTGTYKISQEKYNVIKKKEGVDSDSEFKFTLYKNDLLLIKDTETKEQQLFRFLSRTKPNVKHYVELKPYDKQKFEGNESLINVLGAVAKGGQCQKGINKPNISIYKVRTDVLGNQHIIKNEGDKPKLDF

SEQ ID NO: 599 - protein, 1084 aa, Subdoligranulum sp.
  Subdoligranulum sp. 4_3_54A2FAA
MKNTLYGIGLDIGVASVGWAVVGLNGTGEPVGLHRLGVRIFDKAEQPKTGESLAAPRRMARGMRRRLRRKALRRADVYALLERSGLSTREELAQMFEAGGLEDIYALRTRALDEPVGKAEFSRILLHLAQRRGFKSNRRTASDGEDGRLLAAVNENRRRMAQGGWRTVGEMLYRHEAFALHKRNKADDYLSTVGRDMVAEEASILFERQRAMGCSWAAPELQAEYLSILLRQRSFDEGPGGNSPYGGNQVEKMVGRCTFEPDEPRAAKAAYSFEYFSLLQKLNHIRLAENGETRPLTQPQRQQLLSLAHKTPDISLARIRKELALPETVQFNGVRCRANETLEESEKKEKFACLPAYHKMRKALDGVVKGRISSLSISQRDAAATALSLYKNEDTLRAKLTEAGFQAPEIDALAGLTGFSKFGHLSLKACRKLIPHLEQGLTYDQACTAAGYDFKGHGAGERAFTLPAAAPEMEQITSPVVRRAVAQTIKVVNGIIREMDASPAWVRIELARELSKTFGERQEMDRSMRENAAQNERLMQELRDTFHLLSPTGQDLVKYRLWKEQDGVCAYSLRRLDVERLFEPGYVDVDHIVPYSLSFDDRRSNKVLVLSSENRQKGNRLPLQYLQGKRREDFIVWTNSSVHDYRKRQNLLREKLSGDEAEGFRQRNLQDTQHMARFLYNYISDHLAFAQSEALGKKRVFAVSGAVTSHLRKRWGLSKVRADGDLHHALDAAVVACTTDGMIRRISGYYGHIEGEYLQDADGAGSQHARTKERFPAPWPRFRDELIVRLSEQPAEPLLDINPEFYCEYGTEHIRPVFVSRMPRRKVTGPGHKETIKGAAAADEGLLTVRKALTELKLDKDGEIKDYYMPSSDTLLYEALKAQLRRFGGDGKKAFAEPFYKPKADGTPGPLVRKVKTTEKATLTVPVHGGAASNDTMVRVDVFLVPGDGYYWVPVYTADTLKPELPNRAVVQGKPYSEWKEMREEDFIFSLYPNDLVYVEHKSGLKFTLQNADSTLEKTRTQTSAFAYFVSGSISTASITIRTHDNAYGIPSLGVKTLKTFHKYQVDVLGNVFPVHKETRQKFR

SEQ ID NO: 600 - protein, 1422 aa, Sutterella wadsworthensis
  Sutterella wadsworthensis 3_1_45B
MTQSERRFSCSIGIDMGAKYTGVFYALFDREELPTNLNSKAMTLVMPETGPRYVQAQRTAVRHRLRGQKRYTLARKLAFLVVDDMIKKQEKRLTDEEWKRGREALSGLLKRRGYSRPNADGEDLTPLENVRADVFAAHPAFSTYFSEVRSLAEQWEEFTANISNVEKFLGDPNIPADKEFIEFAVAEGLIDKTEKKAYQSALSTLRANANVLTGLRQMGHKPRSEYFKAIEADLKKDSRLAKINEAFGGAERLARLLGNLSNLQLRAERWYFNAPDIMKDRGWEPDRFKKTLVRAFKFFHPAKDQNKQHLELIKQIENSEDIIETLCTLDPNRTIPPYEDQNNRRPPLDQTLLLSPEKLTRQYGEIWKTWSARLTSAEPTLAPAAEILERSTDRKSRVAVNGHEPLPTLAYQLSYALQRAFDRSKALDPYALRALAAGSKSNKLTSARTALENCIGGQNVKTFLDCARRYYREADDAKVGLWFDNADGLLERSDLHPPMKKKILPLLVANILQTDETTGQKFLDEIWRKQIKGRETVASRCARIETVRKSFGGGFNIAYNTAQYREVNKLPRNAQDKELLTIRDRVAETADFIAANLGLSDEQKRKFANPFSLAQFYTLIETEVSGFSATTLAVHLENAWRMTIKDAVINGETVRAAQCSRLPAETARPFDGLVRRLVDRQAWEIAKRVSTDIQSKVDFSNGIVDVSIFVEENKFEFSASVADLKKNKRVKDKMLSEAEKLETRWLIKNERIKKASRGTCPYTGDRLAEGGEIDHILPRSLIKDARGIVFNAEPNLIYASSRGNQLKKNQRYSLSDLKANYRNEIFKTSNIAAITAEIEDVVTKLQQTHRLKFFDLLNEHEQDCVRHALFLDDGSEARDAVLELLATQRRTRVNGTQIWMIKNLANKIREELQNWCKTTNNRLHFQAAATNVSDAKNLRLKLAQNQPDFEKPDIQPIASHSIDALCSFAVGSADAERDQNGFDYLDGKTVLGLYPQSCEVIHLQAKPQEEKSHFDSVAIFKEGIYAEQFLPIFTLNEKIWIGYETLNAKGERCGAIEVSGKQPKELLEMLAPFFNKPVGDLSAHATYRILKKPAYEFLAKAALQPLSAEEKRLAALLDALRYCTSRKSLMSLFMAANGKSLKKREDVLKPKLFQLKVELKGEKSFKLNGSLTLPVKQDWLRICDSPELADAFGKPCSADELTSKLARIWKRPVMRDLAHAPVRREFSLPAIDNPSGGFRIRRTNLFGNELYQVHAINAKKYRGFASAGSNVDWSKGILFNELQHENLTECGGRFITSADVTPMSEWRKVVAEDNLSIWIAPGTEGRRYVRVETTFIQASHWFEQSVENWAITSPLSLPASFKVDKPAEFQKAVGTELSELLGQPRSEIFIENVGNAKHIRFWYIVVSSNKKMNESYNNVSKS

SEQ ID NO: 601 - protein, 1049 aa, Tistrella mobilis
MINERLTFGIDLGIGSCGWAVLRHADAAGEPGVIEGLGSWCFDVPETSKERIPTNQVRRSNRLLRRVIRRRRNRMAEIRRLFHAQGLLPSADEDALKRPRLDPWELRARGLDQCLSAEEFAVALGHIARHRGFRSSAKRKAANTSGEDSKMLSALLVTRERTARYRTVGEMFARDPEYSARRRNRDGIFDRTVARDDLIHEVGKLFEAQRARGSAFASPDLEADFNAIAFRQAEMQDSERLVGNCPFERDEKRAARWAPSFERFRLLTRLINLRIATAEGERRFTPEDLARVSAELGATAKLPVSRVRALIGLLPDERFTTIRVEDEDRDIVARTGEAAPGTWRLRKTLGEALWAEMQARPDQLDAIAHVLSFFEATAKIRSELDRLGLPAAVIEALDRGLEDGAFAKFKGAGHISAKACRNLLPHLQQGHRYDQACRLAGYDHAASTLSHTAQVVSKAGFNALVTELGESIANPIARKALTEGLKQIRAMCARWGLPGAIHIELAREVGNSIEKRRELESQRETTTKRRQTERDEIRGLLALEDVDDDTLLRYRLWKEQGGKCLYTGKDIHVRQLIATDNSVQVDHILPWSRFGDDSFNNKTLCLASANQRKRGQTPWEWFSLTGTPEAWEVFASRVETSKDLRGFKKRNLLLKNADEVAQRFRSRNLNDTRYAARLLAEAAKLFYPAGDRQEKDGRRRVLTRPGPLTAALRHAWGLESLKKADGKRVSDDRHHALDALAVAAISEREVQRLTRSFQEWEQQGLARPLRHVAPPWPGFRGDVLAAYAQAFVARPERRRARGKGHDASIRQVVGEGPEAQVFERRGLADLKEADLDRVKDPERNQAIIEAVRAWILAGRPADAPPRSPRGDVIVKLRTAPAKKIKPAVPVRGGTADRGDMVRIDVFTRPNRKGRDEWYLVPIYPHQVMNRKAWPHPPMRSVVAYKDEAGWTEIGAEHSFRFSLYPRSYVQLVKSNGDVIEGYLVSMDRSTGAFRVFVHNNPAEMAKGIGAKTLLNLRKFNVDRFGVRTEVKSEVRTWHGEVCTSPVPPD

SEQ ID NO: 602 - protein, 1395 aa, Treponema denticola
  Treponema denticola AL-2
MKKEIKDYFLGLDVGTGSVGWAVTDTDYKLLKANRKDLWGMRCFETAETAEVRRLHRGARRRIERRKKRIKLLQELFSQEIAKIDEGFFQRMKESPFYAEDKTILQENALFNDKDFTDKTYHKAYPTINHLIKAWIENKVKPDPRLLYLACHNIIKKRGHFLFEGDFDSENQFDTSIQALFEYLREDMEVDIDADSQKVKEILKDSSLKNSEKQSRLNKILGLKPSDKQKKAITNLISGNKINFADLYDNPDLKDAEKNSISFSKDDFDALSDDLASILGDSFELLLKAKAVYNCSVLSKVIGDEQYLSFAKVKIYEKHKTDLTKLKAVIKKHFPNNYKKVFGYNQDNESKNNYSGYVGVCKTKNKKLVINNSVNQEDFYKFLKPILSAKSEIKEVNDILAEIETGNFLPKQISKSNAEIPYQLRKMELEKILSNAEKHFSFLKQKDEKGLSHSEKIIMLLTFKIPYYIGPINDNHKKSFPDRCWVVKKEKSPSGKTTPWNFFDHIDKEKTAEEFITSRTNFCTYLIGESVLPKNSLLYSEYTVLNEINNLQIIIDGKNICDTKLKQKIYEDLFKKYKKITQKQISTFIKHEGICNKTDEVIILGIDKECTSSLKSYIELKNIFGKQVDEISTKNMLEEIIRWATIYDEGEGKTILKTKIKAEYGKYCSDEQIKKILNLKFSGWGRLSRKFLETVTSEMPGFSEPVNIITAMRETQNNLMELLSSEFKFTENIKKINSGFEDAEKQFSYDGLVKPLFLSPSVKKMLWQTLKLVKEISHITQAPPKKIFIEMAKGAELEPARTKTRLKILQDLYSSCKNDADAFSSEIQYLSGKIENEDNLRLRSDKLYLYYTQLGKCMYCGKPIEIGHVFDTSNYDIDHIYPQSKIKDDSISNRVLVCSSCNKNKEDKYPLKSEIQSKQRGFWNFLQRNNFISLEKLNRLTRTTPISDDETAKFIARQLVETRQATKVAAKVLEKMFPETKIVYSKAETVSMFRNKFDIIKCREINDFHHAHDAYLNIVVGNVYNTKFTNNPWNFIKEKRDNPKIADTYNYYKVFDYDVKRNNITAWEKGKTIITVKDMLKRNTPIYTRQAACKKGGLFDQTIMKKGLGQHPLKKEGPFSNISKYGGYNKVSAAYYTLIEYEEKGNKIRSLETIPLYLVKDIQKDQDVLKSYLTDLLGKKEFKILVPKIKINSLLKINGFPCHITGKTNDSFLLRPAVQFCCSNDEVLYFKKIIRFSEIRSQREKIGKTISPYEDLSFRSYIKENLCKKTKNDEIGEKEFYDLLQKKNLEIYDMLLTKHKDTIYKKRPNSATIDILVKGKEKFKSLIIENQFEVILEILKLFSATRNVSELQHIGGSKYSGVAKIGNKISSLDNCILIYQSITGIFEKRIDLLKV

SEQ ID NO: 603 - protein, 1395 aa, Treponema denticola
  Treponema denticola ASLM
MKKEIKDYFLGLDVGTGSVGWAVTDTDYKLLKANRKDLWGMRCFETAETAEVRRLHRGARRRIERRKKRIKLLQELFSQEIAKIDEGFFQRMKESPLYAEDKTILQENTLFNDKDFTDKTYHKAYPTINHLIKAWIENKVKPDPRLLYLACHNIIKKRGHFLFEGDFDSENQFDTSIQALFEYLREDMEVDIDADSQKVKEILKDSSLKNSEKQSRLNKMLGLKPSDKQKKAITNLISGNKINFADLYDNPDLKDAEKNSISFSKDDFDALSDDLASILGDSFELLLKAKAVYNCSVLSKVIGDEQYLSFAKVKIYEKHKTDLTKLKNVIKKHFPKDYKKVFGYNKNEKNNNNYSGYVGVCKTKSKKLIINNSVNQEDFYKFLKTILSAKSEIKEVNDILTEIETGTFLPKQISKSNAEIPYQLRKMELEKILSNAEKHFSFLKQKDEKGLSHSEKIIMLLTFKIPYYIGPINDNHKKSFPDRCWVVKKEKSPSGKTTPWNFFDHIDKEKTAEEFITSRTNFCTYLIGESVLPKNSLLYSEYTVLNEINNLQIIIDGKNICDTKLKQKIYEELFKKYKKITQKQISTFIKHEGICNKTDEVIILGIDKECTSSLKSYIELKNIFGKQVDEISTKNMLEEIIRWATIYDEGEGKTILKTKIKAEYGKYCSDEQIKKILNLKFSGWGRLSRKFLETVTSEMPGFSEPVNIITAMRETQNNLMELLSSEFKFTENIKKINSGFEDVEKQFSYDGLVKPLFLSPSVKKMLWQTLKLVKEISHITQAPPKKIFIEMAKGAELDPVRTKTRLKILQDLYNNCKNDADAFSSEIKDLSGKIENEDNLRLRSDKLYLYYTQLGKCMYCGKPIEIGHVFDTSNYDIDHIYPQSKIKDDSISNRVLVCSSCNKNKEDKYPLKAEIQSKQRGFWNFLQRNNFISLEKFNRLTRATPISDDETAKFIARQLVETRQATKVAARVLEKMFPETKIVYSKAETVSMFRNKFDIVKCREINDFHHAHDAYLNIVVGNVYNTKFTNNLWNFIKEKRDNPKIADTYNYYKVFDYDVKRNNITAWEKGKTIITVKDMLKRNTPIYTRQAACKKGGLFDQTIMKKGLGQHPLKKEGPFSNISKYGGYNKVSAAYYTLIEYEEKGNKIRSLETIPLYLVKDIQKDQDVLKSYLTDLLGKKEFKILVPKIKINSLLKINGFPCHITGKTNDSFLLRPAVQFCCSNDEVLYFKKIIRFSEIRSQREKIGKTISPYEDLSFRSYIKENLCKKTKNDEIGEKEFYDLLQKKNLEIYDMLLTKHKDTIYKKRPNSATIDILVKGKEKFKSLIIENQFEVILEILKLFSATRNVSDLQHIGGSKYSGVAKIGNKISSLDNCILIYQSITGIFEKRIDLLKV

SEQ ID NO: 604 - protein, 1395 aa, Treponema denticola
  Treponema denticola ATCC 35405
MKKEIKDYFLGLDVGTGSVGWAVTDTDYKLLKANRKDLWGMRCFETAETAEVRRLHRGARRRIERRKKRIKLLQELFSQEIAKTDEGFFQRMKESPFYAEDKTILQENTLFNDKDFADKTYHKAYPTINHLIKAWIENKVKPDPRLLYLACHNIIKKRGHFLFEGDFDSENQFDTSIQALFEYLREDMEVDIDADSQKVKEILKDSSLKNSEKQSRLNKILGLKPSDKQKKAITNLISGNKINFADLYDNPDLKDAEKNSISFSKDDFDALSDDLASILGDSFELLLKAKAVYNCSVLSKVIGDEQYLSFAKVKIYEKHKTDLTKLKNVIKKHFPKDYKKVFGYNKNEKNNNNYSGYVGVCKTKSKKLIINNSVNQEDFYKFLKTILSAKSEIKEVNDILTEIETGTFLPKQISKSNAEIPYQLRKMELEKILSNAEKHFSFLKQKDEKGLSHSEKIIMLLTFKIPYYIGPINDNHKKFFPDRCWVVKKEKSPSGKTTPWNFFDHIDKEKTAEAFITSRTNFCTYLVGESVLPKSSLLYSEYTVLNEINNLQIIIDGKNICDIKLKQKIYEDLFKKYKKITQKQISTFIKHEGICNKTDEVIILGIDKECTSSLKSYIELKNIFGKQVDEISTKNMLEEIIRWATIYDEGEGKTILKTKIKAEYGKYCSDEQIKKILNLKFSGWGRLSRKFLETVTSEMPGFSEPVNIITAMRETQNNLMELLSSEFTFTENIKKINSGFEDAEKQFSYDGLVKPLFLSPSVKKMLWQTLKLVKEISHITQAPPKKIFIEMAKGAELEPARTKTRLKILQDLYNNCKNDADAFSSEIKDLSGKIENEDNLRLRSDKLYLYYTQLGKCMYCGKPIEIGHVFDTSNYDIDHIYPQSKIKDDSISNRVLVCSSCNKNKEDKYPLKSEIQSKQRGFWNFLQRNNFISLEKLNRLTRATPISDDETAKFIARQLVETRQATKVAAKVLEKMFPETKIVYSKAETVSMFRNKFDIVKCREINDFHHAHDAYLNIVVGNVYNTKFTNNPWNFIKEKRDNPKIADTYNYYKVFDYDVKRNNITAWEKGKTIITVKDMLKRNTPIYTRQAACKKGELFNQTIMKKGLGQHPLKKEGPFSNISKYGGYNKVSAAYYTLIEYEEKGNKIRSLETIPLYLVKDIQKDQDVLKSYLTDLLGKKEFKILVPKIKINSLLKINGFPCHITGKTNDSFLLRPAVQFCCSNNEVLYFKKIIRFSEIRSQREKIGKTISPYEDLSFRSYIKENLWKKTKNDEIGEKEFYDLLQKKNLEIYDMLLTKHKDTIYKKRPNSATIDILVKGKEKFKSLIIENQFEVILEILKLFSATRNVSDLQHIGGSKYSGVAKIGNKISSLDNCILIYQSITGIFEKRIDLLKV

SEQ ID NO: 605 - protein, 1395 aa, Treponema denticola
  Treponema denticola H1-T
MKKEIKDYFLGLDVGTGSVGWAVTDTDYKLLKANRKDLWGMRCFETAETAEVRRLHRGARRRIERRKKRIKLLQELFSQEIAKIDEGFFQRMKESPFYAEDKTILQENALFNDKDFTDKTYHKAYPTINHLIKAWIENKVKPDPRLLYLACHNIIKKRGHFLFEGDFDSENQFDTSIQALFEYLREDMEVDIDADSQKVKEILKDSSLKNSEKQSRLNKILGLKPSDKQKKAITNLISGNKINFADLYDNPDLKDAEKNSISFSKDDFDALSDDLASILGDSFELLLKAKAVYNCSVLSKVIGDEQYLSFAKVKIYEKHKTDLTKLKAVIKKHFPNNYKKVFGYNQDNESKNNYSGYVGVCKTKNKKLVINNSVNQEDFYKFLKPILSAKSEIKEVNDILAEIETGNFLPKQISKSNAEIPYQLRKMELEKILSNAEKHFSFLKQKDEKGLSHSEKIIMLLTFKIPYYIGPINDNHKKSFPDRCWVVKKEKSPSGKTTPWNFFDHIDKEKTAEEFITSRTNFCTYLIGESVLPKNSLLYSEYTVLNEINNLQIIIDGKNICDTKLKQKIYEDLFKKYKKITQKQISTFIKHEGICNKTDEVIILGIDKECTSSLKSYIELKNIFGKQVDEISTKNMLEEIIRWATIYDEGEGKTILKTKIKAEYGKYCSDEQIKKILNLKFSGWGRLSRKFLETVTSEMPGFSEPVNIITAMRETQNNLMELLSSEFKFTENIKKINSGFEDAEKQFSYDGLVKPLFLSPSVKKMLWQTLKLVKEISHITQAPPKKIFIEMAKGAELEPARTKTRLKILQDLYSSCKNDADAFSSEIQYLSGKIENEDNLRLRSDKLYLYYTQLGKCMYCGKPIEIGHVFDTSNYDIDHIYPQSKIKDDSISNRVLVCSSCNKNKEDKYPLKSEIQSKQRGFWNFLQRNNFISLEKLNRLTRTTPISDDETAKFIARQLVETRQATKVAAKVLEKMFPETKIVYSKAETVSMFRNKFDIIKCREINDFHHAHDAYLNIVVGNVYNTKFTNNPWNFIKEKRDNPKIADTYNYYKVFDYDVKRNNITAWEKGKTIITVKDMLKRNTPIYTRQAACKKGELFNQTIMKKGLGQHPLKKEGPFSNISKYGGYNKVSAAYYTLIEYEEKVNKIRSLETIPLYLVKDIQKDQDVLKSYLTDLLGKKEIKILVPKIKINSLLKINGFPCHITGKTGDSFVLRPAVQFCCSNDEVLYFKKIIRFNEIRSQREKMGKTISPYEDLSFRSYIKENLCKKTKADEIGEKEFYDLLQKKNLEIYDMLLTKHKDTIYNKRPNSTTLGMLTKGRYEFINLKPKDQIIVMLEILKLFCTTREAIDLGLIKGKPAAGVATLGKKISNLDNCILIYQSITGIFEKRIDLLKV

SEQ ID NO: 606 - protein, 1395 aa, Treponema denticola
  Treponema denticola H-22
MKKEIKDYFLGLDVGTGSVGWAVTDTDYKLLKANRKDLWGMRCFETAETAEVRRLHRGARRRIERRKKRIKLLQELFSQEIAKIDEGFFQRMKESPFYAEDKTILQENTLFNDKDFTDKTYHKAYPTINHLIKAWIENKVKPDPRLLYLACHNIIKKRGHFLFEGDFDSENQFDTSIQALFEYLREDMEVDIDADSQKVKEILKDSSLKNSEKQSRLNKILGLKPSDKQKKAITNLISGNKINFADLYDNPDLKDAEKNSISFSKDDFDALSDDLASILGDSFELLLKAKAVYNCSVLSKVIGDEQYLSFAKVKIYEKHKTDLTKLKNVIKKHFPKDYKKVFGYNKNEKNNNNYSGYVGVCKTKSKKLIINNSVNQEDFYKFLKTILSAKSEIKEVNDILTEIETGTFLPKQISKSNAEIPYQLRKMELEKILSNAEKHFSFLKQKDEKGLSHSEKIIMLLTFKIPYYIGPINDNHKKSFPDRCWVIKKEKSPSGKTTPWNFFDHIDKDKTAEAFITSRTNFCTYLVGESVLPKSSLLYSEYTVLNEINNLQIIIDGKNICDIKLKQKIYEELFKKYKKITQKQISTFIKHEGICNKTDEVIILGIDKECTSSLKSYIELKNIFGKQVDEISTKNMLEEIIRWATIYDEGEGKTILKTKIKAEYGKYCSDEQIKKILNLKFSGWGRLSRKFLETVTSEMPGFSEPVNIITAMRETQNNLMELLSSEFKFTENIKKINSGFEDAEKQFSYNGLVKPLFLSPSVKKMLWQTLKLVKEISHITQAPPKKIFIEMAKGAELEPARTKTRLKILQDLYNNCKNDADAFSSEIKDLSGKIENEDNLRLRSDKLYLYYTQLGKCMYCGKPIEIGHVFDTSNYDIDHIYPQSKIKDDSISNRVLVCSSCNKNKEDKYPLKSEIQSKQRGFWNFLQRNNFISLEKLNRLTRTTPISDDETAKFIARQLVETRQATKVAAKVLEKMFPETKIVYSKAETVSMFRNKFDIIKCREINDFHHAHDAYLNIVVGNVYNTKFTNNPWNFIKEKRDNPKIADTYNYYKVFDYDVKRNNITAWEKGKTIITVKDMLKRNTPIYTRQAACKKGGLFDQTIMKKGLGQHPLKKEGAFSNISKYGGYNKVSAAYYTLIEYEEKGNKIRSLETIPLYLVKDIQKDQDVLKSYLTDLLGKKEIKILVPKIKINSLLKINGFPCHITGKTGDSFVLRPAVQFCCSNDEVLYFKKIIRFNEIRSQREKMGKTISPYEDLSFRSYIKENLCKKTKADEIGEKEFYDLLQKKNLEIYDMLLTKHKDTIYNKRPNSTTLGMLTKGRYEFINLKPKDQIIVMLEILKLFCTTREAIDLGLIKGKPAAGVATLGKKISNPDNCILIYQSITGIFEKRIDLLKV

SEQ ID NO: 607 - protein, 1395 aa, Treponema denticola
  Treponema denticola OTK
MKKEIKDYFLGLDVGTGSVGWAVTDTDYKLLKANRKDLWGMRCFETAETAEVRRLHRGARRRIERRKKRIKLLQELFSQEIAKIDEGFFQRMKESPLYAEDKTILQENTLFNDKDFTDKTYHKAYPTINHLIKAWIENKVKPDPRLLYLACHNIIKKRGHFLFEGDFDSENQFDTSIQALFEYLREDMELDIDADSQKVKEILKDSSLKNSEKQSRLNKMLGLKPSDKQKKAITNLISGNKINFADLYDNPDLKDAEKNSISFSKDDFDALSDDLASILGDSFELLLKAKAVYNCSVLSKVIGDEQYLSFAKVKIYEKHKTDLTKLKNVIKKHFPKDYKKVFGYNKNEKNNNNYSAYVGVCKITHKKLVIKNSASQEDFYKFLKTILSAKSEIKEVNDILTEIETGTFLPKQISKSNAEIPYQLRKMELEKILSNAEKHFSFLKQKDEKGLSHSEKIIMLLTFKIPYYIGPINDNHKKSFPDRCWVVKKEKSPSGKTTPWNFFDHIDKEKTAEEFITSRTNFCTYLIGESVLPKSSLLYSEYTVLNEINNLQIIIDGKNICDIKLKQKIYEELFKKYKKITQKQISTFIKHEGICNKTDEVIILGIDKECTSSLKSYIELKNIFGKQVDEISTKNMLEEIIRWATIYDEGEGKTILKTKIKAEYGKYCSDEQIKKILNLKFSGWGRLSRKFLETVTSEMPGFSEPVNIITAMRETQNNLMELLSSEFKFTENIKKINSGFEDAEKQFSYNGLVKPLFLSPSVKKMLWQTLKLVKEISHITQAPPKKIFIEMAKGAELEPARTKTRLKILQDLYSSCKNDADAFSSEIQYLSGKIENEDNLRLRSDKLYLYYTQLGKCMYCGKPIEIGHVFDTSNYDIDHIYPQSKIKDDSISNRVLVCSSCNKNKEDKYPLKAEIQSKQRGFWNFLQRNNFISLEKLNRLTRTSPISDDETAKFIARQLVETRQATKVAAKVLEKMFPETKIVYSKAETVSMFRNKFDIIKCREINDFHHAHDAYLNIVVGNVYNTKFTNNPWNFIKEKRDNPKIADTYNYYKVFDYDVKRNNITAWEKGKTIITVKDMLKRNTPIYTRQAACKKGELFNQTIMKKGLGQHPLKKEGPLSNISKYGGYNKVSAAYYTLIEYEEKGSKIRSLETIPLYLVKDIQKNKDGLKSYLTDQIGKKEIKILIPKIKINSLLKINGFPCHITGKMGEAFVLRPAVQFCCSNDEALYFKKIIRFNEIRKQREKMGKTISPYEDLSFRSYIKDNLCKKTKADEIEEKEFYDLLQKKNLEIYDMLLTKHKDTIYKKRPNSATIDILVKGKEKFKSLIIENQFEVILEILKLFSATRNVSDLQHIGGSKNAGNARVGNKISSLDNCILIYQSITGIFEKRIDLLKI

SEQ ID NO: 608 - protein, 1395 aa, Treponema denticola
  Treponema denticola SP37
MKKEIKDYFLGLDVGTGSVGWAVTDTDYKLLKANRKDLWGMRCFETAETAEVRRLHRGARRRIERRKKRIKLLQELFSQEIAKTDEGFFQRMKESPFYAEDKTILQENALFNDRDFTDKTYHKAYPTINHLIKAWIENKVKPDPRLLYLACHNIIKKRGHFLFEGDFDSENQFDTSIQALFEYLREDMEVDIDADSQKVKEILKDSSLKNSEKQSRLNKMLGLKPSDKQKKAITNLISGNKINFADLYDNPDLKDAEKNSISFSKDDFDALSDDLASILGDSFELLLKAKAVYNCSVLSKVIGDEQYLSFAKVKIYEKHKTDLTKLKNVIKKHFPNDYKKVFGYNKNEKNNNNYSAYVGVCKTKSKKLVINNTVNQEDFYKFLKPILLAKSEIKEVNDILTEIETGTFLPKQISKSNAEIPYQLRKMELEKILSNAEKHFSFLKQKDEKGLSHSEKIIMLLTFKIPYYIGPINDNHKKSFPDRCWVIKKEKSPSGKTTPWNFFDHIDKDKTAEAFITSRTNFCTYLVGESVLPKNSLLYSEYTVLNEINNLQIIIDGKNICDIKLKQKIYEELFKKYKKITQKQISTFIKHEGICNKTDEVIILGIDKECTSSLKSYIELKNIFGKQVDEISTKNMLEEIIRWATIYDEGEGKTILKTKIKAEYGKYCSDEQIKKILNLKFSGWGRLSRKFLETVTSEMPGFSEPVNIITAMRETQNNLMELLSSEFKFTENIKKINSGFEDVEKQFSYDSLVKPLFLSPSVKKMLWQTLKLVKEISHITQAPPKKIFIEMAKGAELDPVRTKTRLKILQDLYNNCKNDADAFSSEIKDLSGKIENEDNLRLRSDKLYLYYTQLGKCMYCGKPIEIGHVFDTSNYDIDHIYPQSKIKDDSISNRVLVCSSCNKNKEDKYPLKAEIQSKQRGFWNFLQRNNFISLEKLNRLTRTSPISDDETAKFIARQLVETRQATKVAAKVLEKMFPETKIVYSKAETVSMFRNKFDIIKCREINDFHHAHDAYLNIVVGNVYNTKFTNNPWNFIKEKRDNPKIADTYNYYKVFDYDVKRNNITAWEKGKTIITVKDMLKRNTPIYTRQAACKKGELFNQTIMKKGLGQHPLKKEGPLSNISKYGGYNKVSAAYYTLIEYEEKGSKIRSLETIPLYLVKDIQKNKDGLKSYLTDQIGKKEIKILIPKIKINSLLKINGFPCHITGKMGEAFVLRPAVQFCCSNDEALYFKKIIRFNEIRKQREKMGKTISPYEDLSFRSYIKDNLCKKTKADEIEEKEFYDLLQKKNLEIYDMLLTKHKDTIYKKRPNSATIDILVKGKEKFKSLIIENQFEVILEILKLFSATRNVSDLQHIGGSKNAGNARVGNKISSLDNCILIYQSITGIFEKRIDLLKI

SEQ ID NO: 609 - protein, 1062 aa, Treponema sp.
  Treponema sp. JC4
MIMKLEKWRLGLDLGTNSIGWSVFSLDKDNSVQDLIDMGVRIFSDGRDPKTKEPLAVARRTARSQRKLIYRRKLRRKQVFKFLQEQGLFPKTKEECMTLKSLNPYELRIKALDEKLEPYELGRALFNLAVRRGFKSNRKDGSREEVSEKKSPDEIKTQADMQTHLEKAIKENGCRTITEFLYKNQGENGGIRFAPGRMTYYPTRKMYEEEFNLIRSKQEKYYPQVDWDDIYKAIFYQRPLKPQQRGYCIYENDKERTFKAMPCSQKLRILQDIGNLAYYEGGSKKRVELNDNQDKVLYELLNSKDKVTFDQMRKALCLADSNSFNLEENRDFLIGNPTAVKMRSKNRFGKLWDEIPLEEQDLIIETIITADEDDAVYEVIKKYDLTQEQRDFIVKNTILQSGTSMLCKEVSEKLVKRLEEIADLKYHEAVESLGYKFADQTVEKYDLLPYYGKVLPGSTMEIDLSAPETNPEKHYGKISNPTVHVALNQTRVVVNALIKEYGKPSQIAIELSRDLKNNVEKKAEIARKQNQRAKENIAINDTISALYHTAFPGKSFYPNRNDRMKYRLWSELGLGNKCIYCGKGISGAELFTKEIEIEHILPFSRTLLDAESNLTVAHSSCNAFKAERSPFEAFGTNPSGYSWQEIIQRANQLKNTSKKNKFSPNAMDSFEKDSSFIARQLSDNQYIAKAALRYLKCLVENPSDVWTTNGSMTKLLRDKWEMDSILCRKFTEKEVALLGLKPEQIGNYKKNRFDHRHHAIDAVVIGLTDRSMVQKLATKNSHKGNRIEIPEFPILRSDLIEKVKNIVVSFKPDHGAEGKLSKETLLGKIKLHGKETFVCRENIVSLSEKNLDDIVDEKIKSKVKDYVAKHKGQKIEAVLSDFSKENGIKKVRCVNRVQTPIEITSGKISRYLSPEDYFAAVIWEIPGEKKTFKAQYIRRNEVEKNSKGLNVVKPAVLENGKPHPAAKQVCLLHKDDYLEFSDKGKMYFCRIAGYAATNNKLDIRPVYAVSYCADWINSTNETMLTGYWKPTPTQNWVSVNVLFDKQKARLVTVSPIGRVFRK

SEQ ID NO: 610 - protein, 1011 aa, Unknown
  Description of Unknown: uncultured delta proteobacterium HF0070_07E19 polypeptide
MSSKAIDSLEQLDLFKPQEYTLGLDLGIKSIGWAILSGERIANAGVYLFETAEELNSTGNKLISKAAERGRKRRIRRMLDRKARRGRHIRYLLEREGLPTDELEEVVVHQSNRTLWDVRAEAVERKLTKQELAAVLFHLVRHRGYFPNTKKLPPDDESDSADEEQGKINRATSRLREELKASDCKTIGQFLAQNRDRQRNREGDYSNLMARKLVFEEALQILAFQRKQGHELSKDFEKTYLDVLMGQRSGRSPKLGNCSLIPSELRAPSSAPSTEWFKFLQNLGNLQISNAYREEWSIDAPRRAQIIDACSQRSTSSYWQIRRDFQIPDEYRFNLVNYERRDPDVDLQEYLQQQERKTLANFRNWKQLEKIIGTGHPIQTLDEAARLITLIKDDEKLSDQLADLLPEASDKAITQLCELDFTTAAKISLEAMYRILPHMNQGMGFFDACQQESLPEIGVPPAGDRVPPFDEMYNPVVNRVLSQSRKLINAVIDEYGMPAKIRVELARDLGKGRELRERIKLDQLDKSKQNDQRAEDFRAEFQQAPRGDQSLRYRLWKEQNCTCPYSGRMIPVNSVLSEDTQIDHILPISQSFDNSLSNKVLCFTEENAQKSNRTPFEYLDAADFQRLEAISGNWPEAKRNKLLHKSFGKVAEEWKSRALNDTRYLTSALADHLRHHLPDSKIQTVNGRITGYLRKQWGLEKDRDKHTHHAVDAIVVACTTPAIVQQVTLYHQDIRRYKKLGEKRPTPWPETFRQDVLDVEEEIFITRQPKKVSGGIQTKDTLRKHRSKPDRQRVALTKVKLADLERLVEKDASNRNLYEHLKQCLEESGDQPTKAFKAPFYMPSGPEAKQRPILSKVTLLREKPEPPKQLTELSGGRRYDSMAQGRLDIYRYKPGGKRKDEYRVVLQRMIDLMRGEENVHVFQKGVPYDQGPEIEQNYTFLFSLYFDDLVEFQRSADSEVIRGYYRTFNIANGQLKISTYLEGRQDFDFFGANRLAHFAKVQVNLLGKVIK

SEQ ID NO: 611 - protein, 1032 aa, Unknown
  Description of Unknown: uncultured Termite group 1 bacterium phylotype Rs-D17 polypeptide
MLYHIANHRGTDSVRSFLEYDDDKIKENTLTAKIAKETKKVIDAKKYRTFGEYLYKGKIEKFQQNIRKKVSNRKTPANKNKEFAVTRDVIIKETEKILASQKQYYTYILTDEYIKKIKDAISYQTEKLIPESGYCPYFKDEKRLPRSHKLNEYRRMYEALNNAKYFDPVLDENTGEILSYQEKEFSREEKKILFDEVLLKGMELTESGAKKLLYHLPDGCEVQLQGRDKTTQKIKGYALVDLEASPFWLRLSQQQQDEFLYDWNSLPLEKLKPKLTNYYSLTESEVDETFQEIKLPSNYASVGKKAMEILLTYIKDGCSYTEALEKAVSEGKLKVDKQTMIYDSLPYYGKILKESTQKLIGKAFSKQFADRNYKEPDTNKNEREFGKIANPVVHQTLNELRKLINEIITVFGKKPLEIGLETTRELKKSKKNREYLSKQQNKNEYARNRIYKEYIEPHLSQIKSRQENPSKYISKFELLEEQNFICPFCSEKITPDDIINSKVDVEHIFPIEESEDITKNNLVIAHNECNADKGKKSPFDAFGDKTSGKYRWNCILHNAQKNLPHKVWRFYQGSLEKFLENKPMSRRFGTDNSYISKIAARYLACLFNDPYHSEIFCIKSSLIAQLRIAWDLNSIMVPLVKNILSEKELEEFKISKNKKIRIDNRHHALDAIVIAYANRGYHNFLNRIHAKEYKINYREKSWLSKILLPPLNRDLEDFKISVKDSIEKANVSIKHDHNTNGSLVKATAYKVYYSGAGEYIITTSKNVEEISFKEKEDPKDTLYRALCKFECRDIDIKDEKLIKKLKYNSTLYKKVQNNLSKAKQELEQDNKKTEEEGKKSQKITEVRIYKKACSLVKGQYIQCGSRLKDKFFAVKEPTEIKTGLGYDTGDNLFLDLYYDKTGKLCGEIIRKVNFNRNKPNYQKEGYTLFERIYQSDILEVDTSEDRISLKNKTGSAPSDRTFIKVNTFTEVNAYFDGKRDKIQIFFGNLLKSSFKNDSFFISSMQKYNVRKVILTSLGIIKYRSQILKNKEV

SEQ ID NO: 612 - protein, 1398 aa, Veillonella atypica
  Veillonella atypica ACS-134-V-Col7a
METQTSNQLITSHLKDYPKQDYFVGLDIGTNSVGWAVTNTSYELLKFHSHKMWGSRLFEEGESAVTRRGFRSMRRRLERRKLRLKLLEELFADAMAQVDSTFFIRLHESKYHYEDKTTGHSSKHILFIDEDYTDQDYFTEYPTIYHLRKDLMENGTDDIRKLFLAVHHILKYRGNFLYEGATFNSNAFTFEDVLKQALVNITFNCFDTNSAISSISNILMESGKTKSDKAKAIERLVDTYTVFDEVNTPDKPQKEQVKEDKKTLKAFANLVLGLSANLIDLFGSVEDIDDDLKKLQIVGDTYDEKRDELAKVWGDEIHIIDDCKSVYDAIILMSIKEPGLTISQSKVKAFDKHKEDLVILKSLLKLDRNVYNEMFKSDKKGLHNYVHYIKQGRTEETSCSREDFYKYTKKIVEGLADSKDKEYILNEIELQTLLPLQRIKDNGVIPYQLHLEELKVILDKCGPKFPFLHTVSDGFSVTEKLIKMLEFRIPYYVGPLNTHHNIDNGGFSWAVRKQAGRVTPWNFEEKIDREKSAAAFIKNLTNKCTYLFGEDVLPKSSLLYSEFMLLNELNNVRIDGKALAQGVKQHLIDSIFKQDHKKMTKNRIELFLKDNNYITKKHKPEITGLDGEIKNDLTSYRDMVRILGNNFDVSMAEDIITDITIFGESKKMLRQTLRNKFGSQLNDETIKKLSKLRYRDWGRLSKKLLKGIDGCDKAGNGAPKTIIELMRNDSYNLMEILGDKFSFMECIEEENAKLAQGQVVNPHDIIDELALSPAVKRAVWQALRIVDEVAHIKKALPSRIFVEVARTNKSEKKKKDSRQKRLSDLYSAIKKDDVLQSGLQDKEFGALKSGLANYDDAALRSKKLYLYYTQMGRCAYTGNIIDLNQLNTDNYDIDHIYPRSLTKDDSFDNLVLCERTANAKKSDIYPIDNRIQTKQKPFWAFLKHQGLISERKYERLTRIAPLTADDLSGFIARQLVETNQSVKATTTLLRRLYPDIDVVFVKAENVSDFRHNNNFIKVRSLNHHHHAKDAYLNIVVGNVYHEKFTRNFRLFFKKNGANRTYNLAKMFNYDVICTNAQDGKAWDVKTSMNTVKKMMASNDVRVTRRLLEQSGALADATIYKASVAAKAKDGAYIGMKTKYSVFADVTKYGGMTKIKNAYSIIVQYTGKKGEEIKEIVPLPIYLINRNATDIELIDYVKSVIPKAKDISIKYRKLCINQLVKVNGFYYYLGGKTNDKIYIDNAIELVVPHDIATYIKLLDKYDLLRKENKTLKASSITTSIYNINTSTVVSLSNKVGIDVFDYFMSKLRTPLYMKMKGNKVDELSSTGRSKFIKMTLEEQSIYLLEVLNLLTNSKTTFDVKPLGITGSRSTIGVKIHNLDEFKIINESITGLYSNEVTIV

SEQ ID NO: 613 - protein, 1398 aa, Veillonella parvula
  Veillonella parvula ATCC 17745
METQASNQLISSHLKGYPIKDYFVGLDIGTSSVGWAVTNKAYELLKFRSHKMWGSRLFDEGESAVARRGFRSMRRRLERRKLRLKLLEELFADAMAQVDPTFFMRLRESKYHYEDKTTGHSSKHILFIDKNYNDQDYFKEYPTVYHLRSELMKSGTDDIRKLFLAVHHILKYRGNFLYEGATFDSNASTLDDVIKQALENITFNCFDCNSAISSIGQILMEAGKTKSDKAKAIEHLVDTYIATDTVDTSSKTQKDQVKEDKKRLKAFANLVLGLNASLIDLFGSVEELEEDLKKLQITGDTYDDKRDELAKAWSDEIYIIDDCKSVYDAIILLSIKEPGLTISESKVKAFNKHKDDLAILKSLLKSDRSIYNTMFKVDEKGLHNYVHYIKQGRTEETSCNREDFYKYTKKIVEGLSDSKDKEYILSQIELQILLPLQRIKDNGVIPYQLHLEELKAILAKCGPKFPFLNEVADGFSVAEKLIKMLEFRIPYYVGPLNTHHNVDNGGFAWAVRKASGRVTPWNFDDKIDREKSAAAFIKNLTNKCTYLLGEDVLPKSSLLYSEFMLLNELNNVRIDGKPLEKVVKEHLIEAVFKQDHKKMTKNRIEQFLKDNGYISETHKHEITGLDGEIKNDLASYRDMVRILGDGFDRSMAEEIITDITIFGESKKMLRETLRKKFASCLDDEAIKKLTKLRYRDWGRLSQKLLNGIEGCDKAGDGTPETIIILMRNFSYNLMELLGDKFSFMERIQEINAKLTEGQIVNPHDIIDDLALSPAVKRAVWQALRIVDEVAHIKKALPARIFVEVTRSNKNEKKKKDSRQKRLSDLYAAIKKDDVLLNGLNNEIFGELKSSLAKYDDAALRSKKLYLYYTQMGRCAYTGEIIELSLLNTDNYDIDHIYPRSLTKDDSFDNLVLCKRTANAQKSDAYPISEEIQKTQKPFWTFLKQQGLISERKYERLTRITPLTADDLSGFIARQLVETNQSVKAATTLLRRLYPGVDVVFVKAENVTDFRHDNNFIKVRSLNHHHHAKDAYLNIVVGNVYHERFTRNFRAFFKKNGANRTYNLAKMFNYDVNCTNAKDGKAWDVKTSMDTVKKMMDSNDVRVTKRLLEQTGALADATIYKATVAGKAKDGAYIGMKTKSSVFADVSKYGGMTKIKNAYSIIVQYTGKKGEVIKEIVPLPIYLTNRNTTDQDLINYVASIIPQAKDISIIYGKLCINQLVKVNGFYYYLGGKTNSKFCIDNAIQVIVSNEWIPYLKVLEKFNNMRKDNKDLKANVVSTRALDNKHTIEVRIVEEKNIEFFDYLVSKLKMPIYQKMKGNKAAELSEKGYGLFKKMSLEEQSIHLIELLNLLTNQKTTFEVKPLGITASRSTVGSKISNQDEFKVINESITGLYSNEVTIV

SEQ ID NO: 614 - protein, 1395 aa, Veillonella sp.
  Veillonella sp. 6_1_27
METQASNQLISSHLKGYPIKDYFVGLDIGTSSVGWAVTNKAYELLKFRSHKMWGSRLFDEGESAVARRGFRSMRRRLERRKLRLKLLEELFADAMAQVDPTFFMRLRESKYHYEDKTTGHSSKHILFIDKNYTDQDYYKEYPTIYHLRVALMKSGTDDIRKLFLAVHHILKYRGNFLYEGATFDSNASTLDDVLKQALENITFNCFDSSAAIGSIGQILMELGKTKSDKAKAIERLVDTYIITDEVDTSGKTQKEQVKEDKKRLKSFANLVLGLSASLTDLFGSVEDLDEDLKKLQIIGDTYDERRDDLAKVWGDEIHIIDDCKSVYDAIILMSIKEPGLTISESKVKAFKKHKDDLAILKSLLKSDRSIYNTMFKVDEKGLHNYVHYIKQGRTEETSCNREDFYKYTKKVVEGLPDSKDKEYILSEIELQTLLPLQRIKDNGVIPYQLHLEELKVILAKCGPKFPFLNEVADGFSVAEKLIKMLEFRIPYYVGPLNTHHNVDNGGFAWAVRKASGRVTPWNFDDKIDREKSAAAFIKNLTNKCTYLLGEDVLPKSSLLYSEFMLLNELNNVRIDGKPLEKAVKEHLIEAVFKQDHKKMTKNRIEQFLKDNNYIPEKHKPEITGLDGEIKNDLASYRDMVRILGNNFDLSMAEEIITDITIFGESKKMLRETLRNKFSSRLDDEAIKKLSKLRYRDWGRLSRKLLNVIEGCDKAGDGTPETIIILMRNFSYNLMELLGDKFSFMERIQEINAKLIEGQIVNPHDIIDDLALSPAVKRAVWQALRIVDEIVHIKKTLPARIFVEVTRSNKAEKKKKDSRQKRLSDLYAAIKKDDALLSGLTNEEFGGLKSGLAKYDDAALRSKKLYLYYTQMGRCAYTGEVIDLSQLNTDNYDIDHIYPRSLTKDDSFDNLVLCKRTANAQKSDTYPISKEIQKAQKAFWIFLKQQGLISERKYERLTRITPLTADDLSGFIARQLVETNQSVKAATTLLRRLYPGVDVVFVKAENVTDFRHDNDFIKVRSLNHHHHAKDAYLNIVVGNVYHERFTRNFRAFFKKNGANRTYNLAKMFNYDVKCTNAKDGKAWAVKTSMDTVKKMMDSNDVRVTKRVYEQKGQLSDINLTKASKVKADIYLPIKANDPIMSQNMKYGGYSDIKNAYYTIIEYSDKKNNSIKAFIPIPIFIATKTLTKQALLEYIKTVLPKANNLRIIYKKVYNDQLLKIDGFNYYLGGRSNDRFCIDNAIQLIVPLEIQFYIKLVEKFTAIISENKNIALKASSVKSRNPINNQVENITLEYTQKLFDYLVSKFNELIYLKMRGNKLTDVNNIGRKQFIKLSLEERCKALAELLNIFTNMNKKLSLSTINVSASRKVVNFKISSLDEFKIVNESITGLYSHEITIV

SEQ ID NO: 615 - protein, 1120 aa, Veillonella sp.
  Veillonella sp. oral taxon 780 str. F0422
MGFKANLVNLFTDEDIEVILPEEKEFKSINLHEGIYEDVRDAYEDAWGDRFAIVDQCKVLHDIIVISSIIKPGQSLSEAKIESYNQHKEDLVLLKSVLKEDRKLYDDMFVVDTDKGTNYVKYTKQGVNGNTSATQEEFYKYVRKVVSVLPETEHTRRIVQKLEEGTFLPLQRISKNGVVPYQLHKEELVRILDKATVNFPFLNKVENGLTVADKIISILEFKIPYYVGPLNPTHSIENGGFAWVVRKEAGQVLPWNFEQKVDVQASAVKFIENLTNKCTYLIDQDVLPKYSLLYAEFSLLNELNNIRVNDKPLPADVKQAFIRDHFISLQDSKTATKKVVAKYLVDNNYVSQPPIITGMDQQIATKLTSHRDMTRILGEHFDHAMAEDIIRYITIFGESKDMLRQVLKNYYGDRLTTEQIKKLGKLTYTGWGRLSKKFLSDIWGMKKNDDDAEAGTIIEHMREGQENLMQLLSSSYSFIDVVQEYVTNVLGEKEKTAFEMLEDLSLSPMVKRSVWQTLRILDEIVSIRKELPKKIFVEVARTNKADKKRTQSRKALLEELYKQIKDEDVHVLQQELESKEDSALNSKKLYLYFTQMGRCMYSGRRIDIHELFTDKYDIDHIYPRSLTKDDSWHNIVLVEKQLNAEKTDRFPILSAIQSKQKGFWKLLWDRGFISEKKYDRLVRTTDLTDEELNQFINRQMVSTNQSVKAVTTLLHQLYPETEVVFSKAENVSDFRHDYDFVKVRSINHHHHAKDAYLNIVVGNVYHEKFTKNFLSFAKQKGTRRTYNLTKIFEYEIKLTEESKKVIWDPNIHMDIVKKMMKSNDVRVTQRAVPQKGGLSDETIYKKGIAKRGVYLPLKSSDERVRDVEKYGGRTSITISEYIILNIRDTSDQDRIEIFSLPLYIAGKKDIHKAIEEAYLSTCKKPASVVDIQILYRGLYIGSKVNINGFTYYMGGKTGSNVSIDSAVDVVMDITSSVYIKLLEKVAIKKIENPKTFRIENIKTSYNHKEVTVSKEQNIALYQELLKKLDTPLFSKMKGNKLEEFRTVGFDTFIALSLEEQASVLLEVLNVLTNFKTKRDITKIGMTSSRSTLGINISNTEQFSVITTSITGLYEQEIKIK

SEQ ID NO: 616 - protein, 1068 aa, Verminephrobacter eiseniae
MNKAVAYRLALDLGSTSLGWAIFRLNEAREPTAIIRAGVRIFSDGRNANSEPLAVHRRVARAMRRRRDRLLKRKKRMHDQLVQHGFFPAEVAERKELERLNPYQLRAKGLHEALTPGEFARALFHINQRRGFKSNRKTDRKDNDSGALKQAISELRKRIQDSDCATAGEWFWKERMQQKPEGVRGQWVRARYRKTPSTTDEGKKRIGYDLYVDRAMVEQEFDALWAAQAALQPGLFTEAARAELKDTLLYQRDLRPVKPGRCTLLPAEERAPLALPSTQRFRILQEVNNLRLLDEALREVPLNLAQRDAVVSALEGKKELSFAAIRKLLTLSGKFNLEDEKRAELKGNATSVILARKDLFGDAWAGFDAAVQDEIVWRLVSQESEGALIAWLQQHTGVDGVCAEAIVNTRLPDGYGRLSRKALERIVPALQREVCTYDKAVQAAGFAHHSDLGFDFDYAEDEVQQVGEHTIASTGEVQAQYAFKQLPYYGKALQRHVAFGSGDAKDHEEKCYGKIANPTVHIGLNQVRTVVNALIRRYGHPTEVVVELARDLKQSREQKQQTQREQADNQKRNEDIRKRIAPILETSPERVRDRDIKKWILWEELNKKDIADRHCPYSGERISATMLLSEAVEIEHILPFSRTLDDSLNNRTVAMRRANRIKGDRTPWEARADFEAQGWRYEAILQRAEGMPPRKRYRFAEDGYQRWLGKDRNFLARALNDTSYLSRLAANYLRLVCPQGVRVIPGQMTDKLRGKFGLNSVLGLDGKKNRNDHRHHAVDACVIGVTDQGLMQRFANASKQARENGLTRLVQDMLLPWWPSYYDHVERAVRHIRVSHRPDHGFEGAMMKGTAHGIREDGIREDGRIKQRPKAKGSADHKTITLIPIDEPRQLARHGVDAEGKPLPYKGYASGSNYCIEITKNGKGKWEGQVISTFDAYRIKAAADAAARAGQVISTVEADSIVRKSGWERLRGAQSQNGQPLVMRLVIGDSVRMEVDGRDEVMRVVKMSGKEMVFAPVREANVDKRNNMPDEQDPFTYTYKRADQLRKAKARQVTISPIGELRDPGFKG

SEQ ID NO: 617 - protein, 1440 aa, Weeksella virosa
MKTILGLDLGTNSIGWALVEQDFENKQGLILGMGSRIIPMDAGIIGKFAEGSSISQTAERTGYRSIRRLRERHLLRRERLHRVLNILKFLPEHYAAEIDFEKRFGQFLAETEPKLAWKKNAEGKFEFLFQRSFDEMVADFKANGQDIKIPYDWTIYYLRKKALTQKISPQELAWIILNFNQKRGYYQLRGEEEEENPNKKVEFYSLKIVDVVADEQPNKKGDTWYSLHLENGWVYRRSSKIPLYDWKDKVRDFIVTTDINEDGSEKLDKDGEVKRSFRAPKEDDWTLIKKKTEQEIEQFNQTVGSYIYEALLDNPTQKIRGKLVRTIERKFYKSELKKILEKQIELQPELFTEDLYNACARELYRRNVAHQQQLSSRDFVYLFLNDIIFYQRPLRSQKSLISNCSLEFRTIKDKDGNGQIIYLKAIPKSNPYYQEFRVWQWLYNLKIFTKEDDKDVTNQFINKVEDLEALFEFLMNQKEVNHTDILTYLIEPIVKSKYPNAKGKAFKDELKKELKKYRWNYVYDADKDESKSYPMNETRYELRKRLDKVENVPADFMTRKIEQHLWHIIYSVTDKIEFEKALKSFANKYDLHQESFVENFKRFKPFDSDYGTYSEKAIKKLLPLMRVGKYWSWDIIDDKTKTRIGKIITGEYDETIKNRVREKAIDLTEENHFQGLQLWLAQYIVYDRHSEADIAGKWNSVADLEQYLSEFKQHSLRNPIVEQVITETLRVVRDIWKQYGKGAKDYFDEIHIELGREMKNTAEERKRLSSIISENETTNLRIRAILEELMYDENMENVRPYSPMQQEALKIYEDGVLSSSVEIPEDIEKISKKSEPTKSEIQRYKLWLEQKYRSPYTGRPIPLSKLFTPAYQIEHIIPQARFFDDGFSNKVICESEVNALKDKMLGLEFIQNYYGQKVTTSFGEVTILTEDAYKAFVKEHYDKNRSKRNKLLLEEIPEKMIDRQMNDTRYISKYISKVLSNLVRGEKDDEGVNSKNIIPGNGKITGILKQDWGLNDVWNDLILPRFERMNQLTNSTDFTAWNEKHQKFLPSVPLELSKGFQKKRIDHRHHALDALIIACATRDHVNLLNNKHAKSRNERYDLQHKLRHTTPWQDKEGKVRTKFTEFKKPWETFTQDTKKELEKIVVNFKQNLRVINKATNYYEKIVDGKKVMFKQEGVNWAIRKPMHKETVSGKIDLPRVKVSKGKILTATRKSLDTSFNAKTILSITDTGIQKILLNYLKAKGNPELAFSPEGIEEMNQNISLYNDGKPHQPILKVRVFEQGSKFPLGETGNKTTKYVEAAKGTNLFFGVYEDNQGKRSYDTIPLNIVIERQKQGLNSVPETNEKGHRLLFSLSPNDLVYVPIEGEVFDETNPDVNRIYKVVSFSGSQMFCVRQDVATSIVYKLEFSSLNKMERTIDGIMIKEICIKLKVDRLGNISKA

SEQ ID NO: 618 - protein, 1409 aa, Wolinella succinogenes
MLVSPISVDLGGKNTGFFSFTDSLDNSQSGTVIYDESFVLSQVGRRSKRHSKRNNLRNKLVKRLFLLILQEHHGLSIDVLPDEIRGLFNKRGYTYAGFELDEKKKDALESDTLKEFLSEKLQSIDRDSDVEDFLNQIASNAESFKDYKKGFEAVFASATHSPNKKLELKDELKSEYGENAKELLAGLRVTKEILDEFDKQENQGNLPRAKYFEELGEYIATNEKVKSFFDSNSLKLTDMTKLIGNISNYQLKELRRYFNDKEMEKGDIWIPNKLHKITERFVRSWHPKNDADRQRRAELMKDLKSKEIMELLTTTEPVMTIPPYDDMNNRGAVKCQTLRLNEEYLDKHLPNWRDIAKRLNHGKFNDDLADSTVKGYSEDSTLLHRLLDTSKEIDIYELRGKKPNELLVKTLGQSDANRLYGFAQNYYELIRQKVRAGIWVPVKNKDDSLNLEDNSNMLKRCNHNPPHKKNQIHNLVAGILGVKLDEAKFAEFEKELWSAKVGNKKLSAYCKNIEELRKTHGNTFKIDIEELRKKDPAELSKEEKAKLRLTDDVILNEWSQKIANFFDIDDKHRQRFNNLFSMAQLHTVIDTPRSGFSSTCKRCTAENRFRSETAFYNDETGEFHKKATATCQRLPADTQRPFSGKIERYIDKLGYELAKIKAKELEGMEAKEIKVPIILEQNAFEYEESLRKSKTGSNDRVINSKKDRDGKKLAKAKENAEDRLKDKDKRIKAFSSGICPYCGDTIGDDGEIDHILPRSHTLKIYGTVFNPEGNLIYVHQKCNQAKADSIYKLSDIKAGVSAQWIEEQVANIKGYKTFSVLSAEQQKAFRYALFLQNDNEAYKKVVDWLRTDQSARVNGTQKYLAKKIQEKLTKMLPNKHLSFEFILADATEVSELRRQYARQNPLLAKAEKQAPSSHAIDAVMAFVARYQKVFKDGTPPNADEVAKLAMLDSWNPASNEPLTKGLSTNQKIEKMIKSGDYGQKNMREVFGKSIFGENAIGERYKPIVVQEGGYYIGYPATVKKGYELKNCKVVTSKNDIAKLEKIIKNQDLISLKENQYIKIFSINKQTISELSNRYFNMNYKNLVERDKEIVGLLEFIVENCRYYTKKVDVKFAPKYIHETKYPFYDDWRRFDEAWRYLQENQNKTSSKDRFVIDKSSLNEYYQPDKNEYKLDVDTQPIWDDFCRWYFLDRYKTANDKKSIRIKARKTFSLLAESGVQGKVFRAKRKIPTGYAYQALPMDNNVIAGDYANILLEANSKTLSLVPKSGISIEKQLDKKLDVIKKTDVRGLAIDNNSFFNADFDTHGIRLIVENTSVKVGNFPISAIDKSAKRMIFRALFEKEKGKRKKKTTISFKESGPVQDYLKVFLKKIVKIQLRTDGSISNIVVRKNAADFTLSFRSEHIQKLLK

SEQ ID NO: 619 - protein, 1059 aa, Wolinella succinogenes
MIERILGVDLGISSLGWAIVEYDKDDEAANRIIDCGVRLFTAAETPKKKESPNKARREARGIRRVLNRRRVRMNMIKKLFLRAGLIQDVDLDGEGGMFYSKANRADVWELRHDGLYRLLKGDELARVLIHIAKHRGYKFIGDDEADEESGKVKKAGVVLRQNFEAAGCRTVGEWLWRERGANGKKRNKHGDYEISIHRDLLVEEVEAIFVAQQEMRSTIATDALKAAYREIAFFVRPMQRIEKMVGHCTYFPEERRAPKSAPTAEKFIAISKFFSTVIIDNEGWEQKIIERKTLEELLDFAVSREKVEFRHLRKFLDLSDNEIFKGLHYKGKPKTAKKREATLFDPNEPTELEFDKVEAEKKAWISLRGAAKLREALGNEFYGRFVALGKHADEATKILTYYKDEGQKRRELTKLPLEAEMVERLVKIGFSDFLKLSLKAIRDILPAMESGARYDEAVLMLGVPHKEKSAILPPLNKTDIDILNPTVIRAFAQFRKVANALVRKYGAFDRVHFELAREINTKGEIEDIKESQRKNEKERKEAADWIAETSFQVPLTRKNILKKRLYIQQDGRCAYTGDVIELERLFDEGYCEIDHILPRSRSADDSFANKVLCLARANQQKTDRTPYEWFGHDAARWNAFETRTSAPSNRVRTGKGKIDRLLKKNFDENSEMAFKDRNLNDTRYMARAIKTYCEQYWVFKNSHTKAPVQVRSGKLTSVLRYQWGLESKDRESHTHHAVDAIIIAFSTQGMVQKLSEYYRFKETHREKERPKLAVPLANFRDAVEEATRIENTETVKEGVEVKRLLISRPPRARVTGQAHEQTAKPYPRIKQVKNKKKWRLAPIDEEKFESFKADRVASANQKNFYETSTIPRVDVYHKKGKFHLVPIYLHEMVLNELPNLSLGTNPEAMDENFFKFSIFKDDLISIQTQGTPKKPAKIIMGYFKNMHGANMVLSSINNSPCEGFTCTPVSMDKKHKDKCKLCPEENRIAGRCLQGFLDYWSQEGLRPPRKEFECDQGVKFALDVKKYQIDPLGYYYEVKQEKRLGTIPQMRSAKKLVKK

SEQ ID NO: 620 - protein, 1388 aa, Zunongwangia profunda
MKRILGLDLGTNSIGWALVNEAENEKEISKIIKLGVRVNPLTIDEKTNFEKGRPLSTNADRTLKRGARRNLQRYKLRRENLIEILIDNHIITKETPLTEIGKGTTYQTLSLRAKAVRERIDLEDFAKVLLAINKKRGYKSSRKASNDEEGQAIDGMAIAKELYERGITPGQYVLELLENDRKYIPDFYRSDLKQEFNKIWNNQKTFYPEILTDELFKELDGKNKSQTWAICQKPFNIKGIKRITKGREKTIENYHWRVKGLSGKLNLEKLAIILQEINNDINQSSGYLGGISDKSKKLYLNKETVGEFLYKQIAKNPHTSLKNQVFYRHDYLDEFEQIWKTQSNFNANLTDELKQEIRDVIIFYQRKIKSQKSLISFCQFESWEQEYFDKETGKTKTRTVGRRVIPKSSPLFQEFKIWQNLNHLVFTNSETDEKIEIKEVEQEIRKELFEELNLRGDLNPNDLLKILRSQFKIGKLSNWKCNFEKIEGNRTNAALFNIYQKISDFEGYGIDWNKSNAKKIRKELKATFPEIGIDASILEFDAYKKQLTNQSSYELWHLLYSAEEDFKISEQDKLIYGNSSVSLKKKLHLKFGFNPEYAKMLANLSLMSDYGNLSAKAIKKILPYLEDGHLYSEACRLAGYNHSKSLTAEELEKFEPKAKLDLLKKNSLRNPVVEKILNQMVNVVNQVIDTYGKPDGVRIELARELKKSAKERAEMTKGIADGTRRNEEIKKIITQKFGIPNPTKSDLVRYRLWQELESRGYKDIFTDKYISPDKIFSSEIDIEHIIPKALLFDDSFSNKTLSFRNVNLKKANRTALDFITQDYQSNVEAYKERVETWNKDNHISKGKRNKLLMSLKDIPDGFIERDLRNSQYIARKAKRMLYEVFPNEVLATSGSITDKLRSDWDLINVMKELNLPKYKALGLTEYEERLDKGTEELFKHEVIKDWTKRNDHRHHAMDALAVAFTTHNHIQYINNLNARKDITQDNHPIIKNIENLITEVNSKGKRVFKAPMSSFRESAKEQIEAILVSFKNKNKVVTKNINQTKKEGGFNYQNAKTPRGQLHKETIYGKSKQPLEKPVKINNRFCKKQVGLIINFKEQEAVLHHLKKYDNNEKIAFSNKTLKSDPIQVNGSPLREVKIFEEIFTIRKDINPDNFKTQKHLDKIIDKGIKEVMKKRLEEYNGDFKTAFSDLDKNPIWLNQSKGITIKRATISGVTNAEPLHQAKDHLGNIILDDNGKEIPIDYVSTGNNHHVAIYQDESGNLQEEVVSFYEAVIRKNQDQPIIKKRHPKGWKFLFTMKQNEMFVFSSENFNPSEIDLLDEKNAAIISPNLFRVQKIATKNYMFRHHLETEVTNNLDFTYRHFQATEWLRNLCKVRIDHIGRIVQIGEY

SEQ ID NO: 621-631 - skipped (11 entries)

SEQ ID NO: 632 - RNA, 22 nt, Homo sapiens
ugcucagguugcacagcuggga

SEQ ID NO: 633 - RNA, 22 nt, Homo sapiens
ucccagcugugcaaccugagca

SEQ ID NO: 634 - RNA, 22 nt, Homo sapiens
ucagguguggaaacugaggcag

SEQ ID NO: 635 - RNA, 22 nt, Homo sapiens
cugccucaguuuccacaccuga

SEQ ID NO: 636 - RNA, 22 nt, Homo sapiens
caaaaccgcgauuacucuugca

SEQ ID NO: 637 - RNA, 22 nt, Homo sapiens
ugcaagaguaaucgcgguuuug

SEQ ID NO: 638 - RNA, 21 nt, Homo sapiens
aaaaguaauugugguuuuugc

SEQ ID NO: 639 - RNA, 21 nt, Homo sapiens
gcaaaaaccacaauuacuuuu

SEQ ID NO: 640 - RNA, 21 nt, Homo sapiens
aaaaacugcaaucacuuuugc

SEQ ID NO: 641 - RNA, 21 nt, Homo sapiens
gcaaaagugauugcaguuuuu

SEQ ID NO: 642 - RNA, 22 nt, Homo sapiens
caaaagugauugugguuuuugc

SEQ ID NO: 643 - RNA, 22 nt, Homo sapiens
gcaaaaaccacaaucacuuuug

SEQ ID NO: 644 - RNA, 22 nt, Homo sapiens
agcaguguuuguuuugcccaca

SEQ ID NO: 645 - RNA, 22 nt, Homo sapiens
ugugggcaaaacaaacacugcu

SEQ ID NO: 646 - RNA, 22 nt, Homo sapiens
ucgggcgcaagagcacugcagu

SEQ ID NO: 647 - RNA, 22 nt, Homo sapiens
acugcagugcucuugcgcccga

SEQ ID NO: 648 - RNA, 21 nt, Homo sapiens
acacuuguugggaugaccugc

SEQ ID NO: 649 - RNA, 21 nt, Homo sapiens
gcaggucaucccaacaagugu

SEQ ID NO: 650 - RNA, 24 nt, Homo sapiens
aggagcuauccacuccaggugucc

SEQ ID NO: 651 - RNA, 24 nt, Homo sapiens
ggacaccuggaguggauagcuccu

SEQ ID NO: 652 - RNA, 23 nt, Homo sapiens
ccagagcagccugcgguaacagu

SEQ ID NO: 653 - RNA, 23 nt, Homo sapiens
acuguuaccgcaggcugcucugg

SEQ ID NO: 654 - RNA, 22 nt, Homo sapiens
aguugccagggcugccuuuggu

SEQ ID NO: 655 - RNA, 22 nt, Homo sapiens
accaaaggcagcccuggcaacu

SEQ ID NO: 656 - RNA, 21 nt, Homo sapiens
uagaccaucuuucuagaguau

SEQ ID NO: 657 - RNA, 21 nt, Homo sapiens
auacucuagaaagauggucua

SEQ ID NO: 658 - RNA, 22 nt, Homo sapiens
agcucuagaaagauuguugacc

SEQ ID NO: 659 - RNA, 22 nt, Homo sapiens
ggucaacaaucuuucuagagcu

SEQ ID NO: 660 - RNA, 21 nt, Homo sapiens
gggacuaggaugcagaccucc

SEQ ID NO: 661 - RNA, 21 nt, Homo sapiens
ggaggucugcauccuaguccc

SEQ ID NO: 662 - RNA, 23 nt, Homo sapiens
aggucugcauucaaauccccaga

SEQ ID NO: 663 - RNA, 23 nt, Homo sapiens
ucuggggauuugaaugcagaccu

SEQ ID NO: 664 - RNA, 20 nt, Homo sapiens
cauuacagcacagccauucu

SEQ ID NO: 665 - RNA, 20 nt, Homo sapiens
agaauggcugugcuguaaug

SEQ ID NO: 666 - RNA, 21 nt, Homo sapiens
ucuggcugugcuguaaugcag

SEQ ID NO: 667 - RNA, 21 nt, Homo sapiens
cugcauuacagcacagccaga

SEQ ID NO: 668 - RNA, 21 nt, Homo sapiens
ugacuucuaccucuuccaaag

SEQ ID NO: 669 - RNA, 21 nt, Homo sapiens
cuuuggaagagguagaaguca

SEQ ID NO: 670 - RNA, 22 nt, Homo sapiens
uuggaauaggggauaucucagc

SEQ ID NO: 671 - RNA, 22 nt, Homo sapiens
gcugagauauccccuauuccaa

SEQ ID NO: 672 - RNA, 22 nt, Homo sapiens
ucguaucagagauuccagacac

SEQ ID NO: 673 - RNA, 22 nt, Homo sapiens
gugucuggaaucucugauacga

SEQ ID NO: 674 - RNA, 23 nt, Homo sapiens
acugggaugucacugaauauggu

SEQ ID NO: 675 - RNA, 23 nt, Homo sapiens
accauauucagugacaucccagu

SEQ ID NO: 676 - RNA, 22 nt, Homo sapiens
caaaguccuuccuauuuuuccc

SEQ ID NO: 677 - RNA, 22 nt, Homo sapiens
gggaaaaauaggaaggacuuug

SEQ ID NO: 678 - RNA, 21 nt, Homo sapiens
gaagaauaggagggacuuugu

SEQ ID NO: 679 - RNA, 21 nt, Homo sapiens
acaaagucccuccuauucuuc

SEQ ID NO: 680 - RNA, 22 nt, Homo sapiens
ugggccaugcauuucuagaacu

SEQ ID NO: 681 - RNA, 22 nt, Homo sapiens
aguucuagaaaugcauggccca

SEQ ID NO: 682 - RNA, 21 nt, Homo sapiens
ucuagaaaugcaugacccacc

SEQ ID NO: 683 - RNA, 21 nt, Homo sapiens
ggugggucaugcauuucuaga

SEQ ID NO: 684 - RNA, 22 nt, Homo sapiens
uuccacugccacuaccuaauuu

SEQ ID NO: 685 - RNA, 22 nt, Homo sapiens
aaauuagguaguggcaguggaa

SEQ ID NO: 686 - RNA, 21 nt, Homo sapiens
auuagguaguggcaguggaac

SEQ ID NO: 687 - RNA, 21 nt, Homo sapiens
guuccacugccacuaccuaau

SEQ ID NO: 688 - RNA, 21 nt, Homo sapiens
caccgacucugucuccugcag

SEQ ID NO: 689 - RNA, 21 nt, Homo sapiens
cugcaggagacagagucggug

SEQ ID NO: 690 - RNA, 22 nt, Homo sapiens
cagcaggggagagagaggaguc

SEQ ID NO: 691 - RNA, 22 nt, Homo sapiens
gacuccucucucuccccugcug

SEQ ID NO: 692 - RNA, 22 nt, Homo sapiens
uuccagcccuucuaaugguagg

SEQ ID NO: 693 - RNA, 22 nt, Homo sapiens
ccuaccauuagaagggcuggaa

SEQ ID NO: 694 - RNA, 22 nt, Homo sapiens
uaccauuagaagagcuggaaga

SEQ ID NO: 695 - RNA, 22 nt, Homo sapiens
ucuuccagcucuucuaauggua

SEQ ID NO: 696 - RNA, 21 nt, Homo sapiens
ucaagugucaucugucccuag

SEQ ID NO: 697 - RNA, 21 nt, Homo sapiens
cuagggacagaugacacuuga

SEQ ID NO: 698 - RNA, 23 nt, Homo sapiens
uuugggauugacgccacaugucu

SEQ ID NO: 699 - RNA, 23 nt, Homo sapiens
agacauguggcgucaaucccaaa

SEQ ID NO: 700 - RNA, 21 nt, Homo sapiens
cugccuguucuuccacuccag

SEQ ID NO: 701 - RNA, 21 nt, Homo sapiens
cuggaguggaagaacaggcag

SEQ ID NO: 702 - RNA, 23 nt, Homo sapiens
uauggaguggacuuucagcuggc

SEQ ID NO: 703 - RNA, 23 nt, Homo sapiens
gccagcugaaaguccacuccaua

SEQ ID NO: 704 - RNA, 22 nt, Homo sapiens
ccucaccaucccuucugccugc

SEQ ID NO: 705 - RNA, 22 nt, Homo sapiens
gcaggcagaagggauggugagg

SEQ ID NO: 706 - RNA, 23 nt, Homo sapiens
caggcagaaguggggcugacagg

SEQ ID NO: 707 - RNA, 23 nt, Homo sapiens
ccugucagccccacuucugccug

SEQ ID NO: 708 - RNA, 20 nt, Homo sapiens
ucucuucaucuaccccccag

SEQ ID NO: 709 - RNA, 20 nt, Homo sapiens
cugggggguagaugaagaga

SEQ ID NO: 710 - RNA, 21 nt, Homo sapiens
uuggaggguguggaagacauc

SEQ ID NO: 711 - RNA, 21 nt, Homo sapiens
gaugucuuccacacccuccaa

SEQ ID NO: 712 - RNA, 22 nt, Homo sapiens
cugccagccccguuccagggca

SEQ ID NO: 713 - RNA, 22 nt, Homo sapiens
ugcccuggaacggggcuggcag

SEQ ID NO: 714 - RNA, 23 nt, Homo sapiens
acaaaguacagcauuagccuuag

SEQ ID NO: 715 - RNA, 23 nt, Homo sapiens
cuaaggcuaaugcuguacuuugu

SEQ ID NO: 716 - RNA, 23 nt, Homo sapiens
aaaggucauuguaagguuaaugc

SEQ ID NO: 717 - RNA, 23 nt, Homo sapiens
gcauuaaccuuacaaugaccuuu

SEQ ID NO: 718 - RNA, 22 nt, Homo sapiens
ugaggcuaaugcacuacuucac

SEQ ID NO: 719 - RNA, 22 nt, Homo sapiens
gugaaguagugcauuagccuca

SEQ ID NO: 720 - RNA, 24 nt, Homo sapiens
uauagagagcaggaagauuaaugu

SEQ ID NO: 721 - RNA, 24 nt, Homo sapiens
acauuaaucuuccugcucucuaua

SEQ ID NO: 722 - RNA, 23 nt, Homo sapiens
gugcuucaucguaauuaaccuua

SEQ ID NO: 723 - RNA, 23 nt, Homo sapiens
uaagguuaauuacgaugaagcac

SEQ ID NO: 724 - RNA, 24 nt, Homo sapiens
guggaaagcaugcauccagggugu

SEQ ID NO: 725 - RNA, 24 nt, Homo sapiens
acacccuggaugcaugcuuuccac

SEQ ID NO: 726 - RNA, 22 nt, Homo sapiens
agacacauuuggagagggaacc

SEQ ID NO: 727 - RNA, 22 nt, Homo sapiens
gguucccucuccaaaugugucu

SEQ ID NO: 728 - RNA, 22 nt, Homo sapiens
uucccuuugucauccuaugccu

SEQ ID NO: 729 - RNA, 22 nt, Homo sapiens
aggcauaggaugacaaagggaa

SEQ ID NO: 730 - RNA, 21 nt, Homo sapiens
gcugggaaggcaaagggacgu

SEQ ID NO: 731 - RNA, 21 nt, Homo sapiens
acgucccuuugccuucccagc

SEQ ID NO: 732 - RNA, 21 nt, Homo sapiens
uaccacaggguagaaccacgg

SEQ ID NO: 733 - RNA, 21 nt, Homo sapiens
ccgugguucuacccuguggua

SEQ ID NO: 734 - RNA, 22 nt, Homo sapiens
ggcuggagcgagugcaguggug

SEQ ID NO: 735 - RNA, 22 nt, Homo sapiens
caccacugcacucgcuccagcc

SEQ ID NO: 736 - RNA, 18 nt, Homo sapiens
ccaggcucugcaguggga

SEQ ID NO: 737 - RNA, 18 nt, Homo sapiens
ucccacugcagagccugg

SEQ ID NO: 738 - RNA, 22 nt, Homo sapiens
cugggaggugugauauuguggu

SEQ ID NO: 739 - RNA, 22 nt, Homo sapiens
accacaauaucacaccucccag

SEQ ID NO: 740 - RNA, 22 nt, Homo sapiens
gggaggugugaucucacacucg

SEQ ID NO: 741 - RNA, 22 nt, Homo sapiens
cgagugugagaucacaccuccc

SEQ ID NO: 742 - RNA, 22 nt, Homo sapiens
ugugauaucaugguuccuggga

SEQ ID NO: 743 - RNA, 22 nt, Homo sapiens
ucccaggaaccaugauaucaca

SEQ ID NO: 744 - RNA, 22 nt, Homo sapiens
ugugauaucgugcuuccuggga

SEQ ID NO: 745 - RNA, 22 nt, Homo sapiens
ucccaggaagcacgauaucaca

SEQ ID NO: 746 - RNA, 18 nt, Homo sapiens
ggugggcuucccggaggg

SEQ ID NO: 747 - RNA, 18 nt, Homo sapiens
cccuccgggaagcccacc

SEQ ID NO: 748 - RNA, 18 nt, Homo sapiens
cacugcaggacucagcag

SEQ ID NO: 749 - RNA, 18 nt, Homo sapiens
cugcugaguccugcagug

SEQ ID NO: 750 - RNA, 17 nt, Homo sapiens
ugagggaggagacugca

SEQ ID NO: 751 - RNA, 17 nt, Homo sapiens
ugcagucuccucccuca

SEQ ID NO: 752 - RNA, 18 nt, Homo sapiens
gaggcugaaggaagaugg

SEQ ID NO: 753 - RNA, 18 nt, Homo sapiens
ccaucuuccuucagccuc

SEQ ID NO: 754 - RNA, 22 nt, Homo sapiens
gucacugaugucuguagcugag

SEQ ID NO: 755 - RNA, 22 nt, Homo sapiens
cucagcuacagacaucagugac

SEQ ID NO: 756 - RNA, 22 nt, Homo sapiens
accugucuguggaaaggagcua

SEQ ID NO: 757 - RNA, 22 nt, Homo sapiens
uagcuccuuuccacagacaggu

SEQ ID NO: 758 - RNA, 22 nt, Homo sapiens
agaguuaacucaaaauggacua

SEQ ID NO: 759 - RNA, 22 nt, Homo sapiens
uaguccauuuugaguuaacucu

SEQ ID NO: 760 - RNA, 22 nt, Homo sapiens
uguugggauucagcaggaccau

SEQ ID NO: 761 - RNA, 22 nt, Homo sapiens
augguccugcugaaucccaaca

SEQ ID NO: 762 - RNA, 17 nt, Homo sapiens
gaagauggacguacuuu

SEQ ID NO: 763 - RNA, 17 nt, Homo sapiens
aaaguacguccaucuuc

SEQ ID NO: 764 - RNA, 21 nt, Homo sapiens
ucugaauagagucugaagagu

SEQ ID NO: 765 - RNA, 21 nt, Homo sapiens
acucuucagacucuauucaga

SEQ ID NO: 766 - RNA, 22 nt, Homo sapiens
caaggagacgggaacauggagc

SEQ ID NO: 767 - RNA, 22 nt, Homo sapiens
gcuccauguucccgucuccuug

SEQ ID NO: 768 - RNA, 20 nt, Homo sapiens
aaaagcugggcugagaggcg

SEQ ID NO: 769 - RNA, 20 nt, Homo sapiens
cgccucucagcccagcuuuu

SEQ ID NO: 770 - RNA, 18 nt, Homo sapiens
aggcuggagugagcggag

SEQ ID NO: 771 - RNA, 18 nt, Homo sapiens
cuccgcucacuccagccu

SEQ ID NO: 772 - RNA, 22 nt, Homo sapiens
gcgacucugaaaacuagaaggu

SEQ ID NO: 773 - RNA, 22 nt, Homo sapiens
accuucuaguuuucagagucgc

SEQ ID NO: 774 - RNA, 20 nt, Homo sapiens
aaagacucugcaagaugccu

SEQ ID NO: 775 - RNA, 20 nt, Homo sapiens
aggcaucuugcagagucuuu

SEQ ID NO: 776 - RNA, 21 nt, Homo sapiens
acaggagugggggugggacau

SEQ ID NO: 777 - RNA, 21 nt, Homo sapiens
augucccacccccacuccugu

SEQ ID NO: 778 - RNA, 21 nt, Homo sapiens
cgucccaccccccacuccugu

SEQ ID NO: 779 - RNA, 21 nt, Homo sapiens
acaggaguggggggugggacg

SEQ ID NO: 780 - RNA, 18 nt, Homo sapiens
aggagaaguaaaguagaa

SEQ ID NO: 781 - RNA, 18 nt, Homo sapiens
uucuacuuuacuucuccu

SEQ ID NO: 782 - RNA, 22 nt, Homo sapiens
auggccagagcucacacagagg

SEQ ID NO: 783 - RNA, 22 nt, Homo sapiens
ccucugugugagcucuggccau

SEQ ID NO: 784 - RNA, 21 nt, Homo sapiens
ugggcucaggguacaaagguu

SEQ ID NO: 785 - RNA, 21 nt, Homo sapiens
aaccuuuguacccugagccca

SEQ ID NO: 786 - RNA, 21 nt, Homo sapiens
cacaggcuuagaaaagacagu

SEQ ID NO: 787 - RNA, 21 nt, Homo sapiens
acugucuuuucuaagccugug

SEQ ID NO: 788 - RNA, 22 nt, Homo sapiens
gugacugauaccuuggaggcau

SEQ ID NO: 789 - RNA, 22 nt, Homo sapiens
augccuccaagguaucagucac

SEQ ID NO: 790 - RNA, 22 nt, Homo sapiens
ugucguggggcuugcuggcuug

SEQ ID NO: 791 - RNA, 22 nt, Homo sapiens
caagccagcaagccccacgaca

SEQ ID NO: 792 - RNA, 17 nt, Homo sapiens
acagggaggagauugua

SEQ ID NO: 793 - RNA, 17 nt, Homo sapiens
uacaaucuccucccugu

SEQ ID NO: 794 - RNA, 17 nt, Homo sapiens
gccggacaagagggagg

SEQ ID NO: 795 - RNA, 17 nt, Homo sapiens
ccucccucuuguccggc

SEQ ID NO: 796 - RNA, 17 nt, Homo sapiens
uuggaggcguggguuuu

SEQ ID NO: 797 - RNA, 17 nt, Homo sapiens
aaaacccacgccuccaa

SEQ ID NO: 798 - RNA, 18 nt, Homo sapiens
cucgaguuggaagaggcg

SEQ ID NO: 799 - RNA, 18 nt, Homo sapiens
cgccucuuccaacucgag

SEQ ID NO: 800 - RNA, 21 nt, Homo sapiens
cacggcaaaagaaacaaucca

SEQ ID NO: 801 - RNA, 21 nt, Homo sapiens
uggauuguuucuuuugccgug

SEQ ID NO: 802 - RNA, 22 nt, Homo sapiens
agauuguuucuuuugccgugca

SEQ ID NO: 803 - RNA, 22 nt, Homo sapiens
ugcacggcaaaagaaacaaucu

SEQ ID NO: 804 - RNA, 17 nt, Homo sapiens
ggugggggcuguuguuu

SEQ ID NO: 805 - RNA, 17 nt, Homo sapiens
aaacaacagcccccacc

SEQ ID NO: 806 - RNA, 20 nt, Homo sapiens
ggcuccuuggucuaggggua

SEQ ID NO: 807 - RNA, 20 nt, Homo sapiens
uaccccuagaccaaggagcc

SEQ ID NO: 808 - RNA, 22 nt, Homo sapiens
cgucccggggcugcgcgaggca

SEQ ID NO: 809 - RNA, 22 nt, Homo sapiens
ugccucgcgcagccccgggacg

SEQ ID NO: 810 - RNA, 22 nt, Homo sapiens
uggggauuuggagaagugguga

SEQ ID NO: 811 - RNA, 22 nt, Homo sapiens
ucaccacuucuccaaaucccca

SEQ ID NO: 812 - RNA, 17 nt, Homo sapiens
ugguagagcugaggaca

SEQ ID NO: 813 - RNA, 17 nt, Homo sapiens
uguccucagcucuacca

SEQ ID NO: 814 - RNA, 23 nt, Homo sapiens
uugaauucuuggccuuaagugau

SEQ ID NO: 815 - RNA, 23 nt, Homo sapiens
aucacuuaaggccaagaauucaa

SEQ ID NO: 816 - RNA, 20 nt, Homo sapiens
gagcuuggucuguagcgguu

SEQ ID NO: 817 - RNA, 20 nt, Homo sapiens
aaccgcuacagaccaagcuc

SEQ ID NO: 818 - RNA, 20 nt, Homo sapiens
ggauccgagucacggcacca

SEQ ID NO: 819 - RNA, 20 nt, Homo sapiens
uggugccgugacucggaucc

SEQ ID NO: 820 - RNA, 17 nt, Homo sapiens
aggguguguguguuuuu

SEQ ID NO: 821 - RNA, 17 nt, Homo sapiens
aaaaacacacacacccu

SEQ ID NO: 822 - RNA, 17 nt, Homo sapiens
ccugguggcuuccuuuu

SEQ ID NO: 823 - RNA, 17 nt, Homo sapiens
aaaaggaagccaccagg

SEQ ID NO: 824 - RNA, 22 nt, Homo sapiens
ucacaagguauugacuggcgua

SEQ ID NO: 825 - RNA, 22 nt, Homo sapiens
uacgccagucaauaccuuguga

SEQ ID NO: 826 - RNA, 19 nt, Homo sapiens
agagguagguguggaagaa

SEQ ID NO: 827 - RNA, 19 nt, Homo sapiens
uucuuccacaccuaccucu

SEQ ID NO: 828 - RNA, 22 nt, Homo sapiens
ccaggaggcggaggagguggag

SEQ ID NO: 829 - RNA, 22 nt, Homo sapiens
cuccaccuccuccgccuccugg

SEQ ID NO: 830 - RNA, 22 nt, Homo sapiens
auagugguugugaauuuaccuu

SEQ ID NO: 831 - RNA, 22 nt, Homo sapiens
aagguaaauucacaaccacuau

SEQ ID NO: 832 - RNA, 23 nt, Homo sapiens
gauugagacuaguagggcuaggc

SEQ ID NO: 833 - RNA, 23 nt, Homo sapiens
gccuagcccuacuagucucaauc

SEQ ID NO: 834 - RNA, 23 nt, Homo sapiens
ugacacggaggguggcuugggaa

SEQ ID NO: 835 - RNA, 23 nt, Homo sapiens
uucccaagccacccuccguguca

SEQ ID NO: 836 - RNA, 17 nt, Homo sapiens
gagacugggguggggcc

SEQ ID NO: 837 - RNA, 17 nt, Homo sapiens
ggccccaccccagucuc

SEQ ID NO: 838 - RNA, 21 nt, Homo sapiens
aagguuuggauagaugcaaua

SEQ ID NO: 839 - RNA, 21 nt, Homo sapiens
uauugcaucuauccaaaccuu

SEQ ID NO: 840 - RNA, 22 nt, Homo sapiens
cucaaguagucugaccagggga

SEQ ID NO: 841 - RNA, 22 nt, Homo sapiens
uccccuggucagacuacuugag

SEQ ID NO: 842 - RNA, 18 nt, Homo sapiens
gggugcgggccggcgggg

SEQ ID NO: 843 - RNA, 18 nt, Homo sapiens
ccccgccggcccgcaccc

SEQ ID NO: 844 - RNA, 18 nt, Homo sapiens
agagcagaaggaugagau

SEQ ID NO: 845 - RNA, 18 nt, Homo sapiens
aucucauccuucugcucu

SEQ ID NO: 846 - RNA, 21 nt, Homo sapiens
uggcaaacguggaagccgaga

SEQ ID NO: 847 - RNA, 21 nt, Homo sapiens
ucucggcuuccacguuugcca

SEQ ID NO: 848 - RNA, 18 nt, Homo sapiens
ggugggggguguuguuuu

SEQ ID NO: 849 - RNA, 18 nt, Homo sapiens
aaaacaacaccccccacc

SEQ ID NO: 850 - RNA, 22 nt, Homo sapiens
cuagugcucuccguuacaagua

SEQ ID NO: 851 - RNA, 22 nt, Homo sapiens
uacuuguaacggagagcacuag

SEQ ID NO: 852 - RNA, 22 nt, Homo sapiens
caagggaccaagcauucauuau

SEQ ID NO: 853 - RNA, 22 nt, Homo sapiens
auaaugaaugcuuggucccuug

SEQ ID NO: 854 - RNA, 22 nt, Homo sapiens
caggaaggauuuagggacaggc

SEQ ID NO: 855 - RNA, 22 nt, Homo sapiens
gccugucccuaaauccuuccug

SEQ ID NO: 856 - RNA, 22 nt, Homo sapiens
cuauuaaggacauuugugauuc

SEQ ID NO: 857 - RNA, 22 nt, Homo sapiens
gaaucacaaauguccuuaauag

SEQ ID NO: 858 - RNA, 22 nt, Homo sapiens
auuaaggacauuugugauugau

SEQ ID NO: 859 - RNA, 22 nt, Homo sapiens
aucaaucacaaauguccuuaau

SEQ ID NO: 860 - RNA, 17 nt, Homo sapiens
gaggcugagcugaggag

SEQ ID NO: 861 - RNA, 17 nt, Homo sapiens
cuccucagcucagccuc

SEQ ID NO: 862 - RNA, 22 nt, Homo sapiens
cgcgcggccgugcucggagcag

SEQ ID NO: 863 - RNA, 22 nt, Homo sapiens
cugcuccgagcacggccgcgcg

SEQ ID NO: 864 - RNA, 21 nt, Homo sapiens
agccaaguggaaguuacuuua

SEQ ID NO: 865 - RNA, 21 nt, Homo sapiens
uaaaguaacuuccacuuggcu

SEQ ID NO: 866 - RNA, 17 nt, Homo sapiens
ggagugggcuggugguu

SEQ ID NO: 867 - RNA, 17 nt, Homo sapiens
aaccaccagcccacucc

SEQ ID NO: 868 - RNA, 22 nt, Homo sapiens
uuucuauuucucaguggggcuc

SEQ ID NO: 869 - RNA, 22 nt, Homo sapiens
gagccccacugagaaauagaaa

SEQ ID NO: 870 - RNA, 22 nt, Homo sapiens
aacccagugggcuauggaaaug

SEQ ID NO: 871 - RNA, 22 nt, Homo sapiens
cauuuccauagcccacuggguu

SEQ ID NO: 872 - RNA, 17 nt, Homo sapiens
gggguggucuguuguug

SEQ ID NO: 873 - RNA, 17 nt, Homo sapiens
caacaacagaccacccc

SEQ ID NO: 874 - RNA, 20 nt, Homo sapiens
aaaaggcgggagaagcccca

SEQ ID NO: 875 - RNA, 20 nt, Homo sapiens
uggggcuucucccgccuuuu

SEQ ID NO: 876 - RNA, 20 nt, Homo sapiens
uaacggccgcgguacccuaa

SEQ ID NO: 877 - RNA, 20 nt, Homo sapiens
uuaggguaccgcggccguua

SEQ ID NO: 878 - RNA, 17 nt, Homo sapiens
gcugggcgaggcuggca

SEQ ID NO: 879 - RNA, 17 nt, Homo sapiens
ugccagccucgcccagc

SEQ ID NO: 880 - RNA, 19 nt, Homo sapiens
agagcuggcugaagggcag

SEQ ID NO: 881 - RNA, 19 nt, Homo sapiens
cugcccuucagccagcucu

SEQ ID NO: 882 - RNA, 18 nt, Homo sapiens
agggggcgggcuccggcg

SEQ ID NO: 883 - RNA, 18 nt, Homo sapiens
cgccggagcccgcccccu

SEQ ID NO: 884 - RNA, 22 nt, Homo sapiens
ucugguaagagauuugggcaua

SEQ ID NO: 885 - RNA, 22 nt, Homo sapiens
uaugcccaaaucucuuaccaga

SEQ ID NO: 886 - RNA, 22 nt, Homo sapiens
aauguggacuggugugaccaaa

SEQ ID NO: 887 - RNA, 22 nt, Homo sapiens
uuuggucacaccaguccacauu

SEQ ID NO: 888 - RNA, 17 nt, Homo sapiens
ggggcugggcgcgcgcc

SEQ ID NO: 889 - RNA, 17 nt, Homo sapiens
ggcgcgcgcccagcccc

SEQ ID NO: 890 - RNA, 21 nt, Homo sapiens
agaaggccuuuccaucucugu

SEQ ID NO: 891 - RNA, 21 nt, Homo sapiens
acagagauggaaaggccuucu

SEQ ID NO: 892 - RNA, 22 nt, Homo sapiens
ccagacuguggcugaccagagg

SEQ ID NO: 893 - RNA, 22 nt, Homo sapiens
ccucuggucagccacagucugg

SEQ ID NO: 894 - RNA, 21 nt, Homo sapiens
aauguaaacaggcuuuuugcu

SEQ ID NO: 895 - RNA, 21 nt, Homo sapiens
agcaaaaagccuguuuacauu

SEQ ID NO: 896 - RNA, 22 nt, Homo sapiens
gaggaaacugaagcugagaggg

SEQ ID NO: 897 - RNA, 22 nt, Homo sapiens
cccucucagcuucaguuuccuc

SEQ ID NO: 898 - RNA, 17 nt, Homo sapiens
cuccgggacggcugggc

SEQ ID NO: 899 - RNA, 17 nt, Homo sapiens
gcccagccgucccggag

SEQ ID NO: 900 - RNA, 22 nt, Homo sapiens
ugggcuggcagggcaagugcug

SEQ ID NO: 901 - RNA, 22 nt, Homo sapiens
cagcacuugcccugccagccca

SEQ ID NO: 902 - RNA, 17 nt, Homo sapiens
aagacugagaggaggga

SEQ ID NO: 903 - RNA, 17 nt, Homo sapiens
ucccuccucucagucuu

SEQ ID NO: 904 - RNA, 17 nt, Homo sapiens
ugagguaguaguuucuu

SEQ ID NO: 905 - RNA, 17 nt, Homo sapiens
aagaaacuacuaccuca

SEQ ID NO: 906 - RNA, 21 nt, Homo sapiens
uaugugaccucggaugaauca

SEQ ID NO: 907 - RNA, 21 nt, Homo sapiens
ugauucauccgaggucacaua

SEQ ID NO: 908 - RNA, 22 nt, Homo sapiens
gcugaugaugauggugcugaag

SEQ ID NO: 909 - RNA, 22 nt, Homo sapiens
cuucagcaccaucaucaucagc

SEQ ID NO: 910 - RNA, 22 nt, Homo sapiens
uuuaagcaggaaauagaauuua

SEQ ID NO: 911 - RNA, 22 nt, Homo sapiens
uaaauucuauuuccugcuuaaa

SEQ ID NO: 912 - RNA, 22 nt, Homo sapiens
ugugacaauagagaugaacaug

SEQ ID NO: 913 - RNA, 22 nt, Homo sapiens
cauguucaucucuauugucaca

SEQ ID NO: 914 - RNA, 18 nt, Homo sapiens
aggcugggcugggacgga

SEQ ID NO: 915 - RNA, 18 nt, Homo sapiens
uccgucccagcccagccu

SEQ ID NO: 916 - RNA, 20 nt, Homo sapiens
aaauggguggucugaggcaa

SEQ ID NO: 917 - RNA, 20 nt, Homo sapiens
uugccucagaccacccauuu

SEQ ID NO: 918 - RNA, 20 nt, Homo sapiens
cuggguugggcugggcuggg

SEQ ID NO: 919 - RNA, 20 nt, Homo sapiens
cccagcccagcccaacccag

SEQ ID NO: 920 - RNA, 17 nt, Homo sapiens
gcggggcugggcgcgcg

SEQ ID NO: 921 - RNA, 17 nt, Homo sapiens
cgcgcgcccagccccgc

SEQ ID NO: 922 - RNA, 22 nt, Homo sapiens
acuaaaggauauagaagguuuu

SEQ ID NO: 923 - RNA, 22 nt, Homo sapiens
aaaaccuucuauauccuuuagu

SEQ ID NO: 924 - RNA, 22 nt, Homo sapiens
ugagggaguaggauguaugguu

SEQ ID NO: 925 - RNA, 22 nt, Homo sapiens
aaccauacauccuacucccuca

SEQ ID NO: 926 - RNA, 22 nt, Homo sapiens
gaagaacuguugcauuugcccu

SEQ ID NO: 927 - RNA, 22 nt, Homo sapiens
agggcaaaugcaacaguucuuc

SEQ ID NO: 928 - RNA, 22 nt, Homo sapiens
cagggccucacuguaucgccca

SEQ ID NO: 929 - RNA, 22 nt, Homo sapiens
ugggcgauacagugaggcccug

SEQ ID NO: 930 - RNA, 22 nt, Homo sapiens
agacugacggcuggaggcccau

SEQ ID NO: 931 - RNA, 22 nt, Homo sapiens
augggccuccagccgucagucu

SEQ ID NO: 932 - RNA, 18 nt, Homo sapiens
acaggcaggauuggggaa

SEQ ID NO: 933 - RNA, 18 nt, Homo sapiens
uuccccaauccugccugu

SEQ ID NO: 934 - RNA, 22 nt, Homo sapiens
aggacuggacucccggcagccc

SEQ ID NO: 935 - RNA, 22 nt, Homo sapiens
gggcugccgggaguccaguccu

SEQ ID NO: 936 - RNA, 17 nt, Homo sapiens
gggagaagggucggggc

SEQ ID NO: 937 - RNA, 17 nt, Homo sapiens
gccccgacccuucuccc

SEQ ID NO: 938 - RNA, 25 nt, Homo sapiens
aaauaugaugaaacucacagcugag

SEQ ID NO: 939 - RNA, 25 nt, Homo sapiens
cucagcugugaguuucaucauauuu

SEQ ID NO: 940 - RNA, 26 nt, Homo sapiens
gcucagggaugauaacugugcugaga

SEQ ID NO: 941 - RNA, 26 nt, Homo sapiens
ucucagcacaguuaucaucccugagc

SEQ ID NO: 942 - RNA, 18 nt, Homo sapiens
cagcagugcgcagggcug

SEQ ID NO: 943 - RNA, 18 nt, Homo sapiens
cagcccugcgcacugcug

SEQ ID NO: 944 - RNA, 22 nt, Homo sapiens
gcuaaggaaguccugugcucag

SEQ ID NO: 945 - RNA, 22 nt, Homo sapiens
cugagcacaggacuuccuuagc

SEQ ID NO: 946 - RNA, 21 nt, Homo sapiens
ugacucugccuguaggccggu

SEQ ID NO: 947 - RNA, 21 nt, Homo sapiens
accggccuacaggcagaguca

SEQ ID NO: 948 - RNA, 21 nt, Homo sapiens
gaccgagagggccucggcugu

SEQ ID NO: 949 - RNA, 21 nt, Homo sapiens
acagccgaggcccucucgguc

SEQ ID NO: 950 - RNA, 21 nt, Homo sapiens
ggggggaugugcaugcugguu

SEQ ID NO: 951 - RNA, 21 nt, Homo sapiens
aaccagcaugcacaucccccc

SEQ ID NO: 952 - RNA, 22 nt, Homo sapiens
uggucugcaaagagaugacugu

SEQ ID NO: 953 - RNA, 22 nt, Homo sapiens
acagucaucucuuugcagacca

SEQ ID NO: 954 - RNA, 22 nt, Homo sapiens
ucauuauauguaugaucuggac

SEQ ID NO: 955 - RNA, 22 nt, Homo sapiens
guccagaucauacauauaauga

SEQ ID NO: 956 - RNA, 18 nt, Homo sapiens
cccagcaggacgggagcg

SEQ ID NO: 957 - RNA, 18 nt, Homo sapiens
cgcucccguccugcuggg

SEQ ID NO: 958 - RNA, 17 nt, Homo sapiens
auggagaaggcuucuga

SEQ ID NO: 959 - RNA, 17 nt, Homo sapiens
ucagaagccuucuccau

SEQ ID NO: 960 - RNA, 17 nt, Homo sapiens
ccccggggagcccggcg

SEQ ID NO: 961 - RNA, 17 nt, Homo sapiens
cgccgggcuccccgggg

SEQ ID NO: 962 - RNA, 22 nt, Homo sapiens
uggaaggagguugccggacgcu

SEQ ID NO: 963 - RNA, 22 nt, Homo sapiens
agcguccggcaaccuccuucca

SEQ ID NO: 964 - RNA, 17 nt, Homo sapiens
ggauggaggaggggucu

SEQ ID NO: 965 - RNA, 17 nt, Homo sapiens
agaccccuccuccaucc

SEQ ID NO: 966 - RNA, 17 nt, Homo sapiens
guggaccuggcugggac

SEQ ID NO: 967 - RNA, 17 nt, Homo sapiens
gucccagccagguccac

SEQ ID NO: 968 - RNA, 21 nt, Homo sapiens
ucgugcauauaucuaccacau

SEQ ID NO: 969 - RNA, 21 nt, Homo sapiens
augugguagauauaugcacga

SEQ ID NO: 970 - RNA, 21 nt, Homo sapiens
ugugguagauauaugcacgau

SEQ ID NO: 971 - RNA, 21 nt, Homo sapiens
aucgugcauauaucuaccaca

SEQ ID NO: 972 - RNA, 22 nt, Homo sapiens
ugagccgagcugagcuuagcug

SEQ ID NO: 973 - RNA, 22 nt, Homo sapiens
cagcuaagcucagcucggcuca

SEQ ID NO: 974 - RNA, 22 nt, Homo sapiens
gagcuuggaugagcugggcuga

SEQ ID NO: 975 - RNA, 22 nt, Homo sapiens
ucagcccagcucauccaagcuc

SEQ ID NO: 976 - RNA, 22 nt, Homo sapiens
gcugaacugggcugagcugggc

SEQ ID NO: 977 - RNA, 22 nt, Homo sapiens
gcccagcucagcccaguucagc

SEQ ID NO: 978 - RNA, 21 nt, Homo sapiens
uuaguccugccuguagguuua

SEQ ID NO: 979 - RNA, 21 nt, Homo sapiens
uaaaccuacaggcaggacuaa

SEQ ID NO: 980 - RNA, 20 nt, Homo sapiens
uugggcugggcuggguuggg

SEQ ID NO: 981 - RNA, 20 nt, Homo sapiens
cccaacccagcccagcccaa

SEQ ID NO: 982 - RNA, 20 nt, Homo sapiens
uaggaugggggugagaggug

SEQ ID NO: 983 - RNA, 20 nt, Homo sapiens
caccucucacccccauccua

SEQ ID NO: 984 - RNA, 22 nt, Homo sapiens
aaaaguaauuguggauuuugcu

SEQ ID NO: 985 - RNA, 22 nt, Homo sapiens
agcaaaauccacaauuacuuuu

SEQ ID NO: 986 - RNA, 22 nt, Homo sapiens
caaaaaccggcaauuacuuuug

SEQ ID NO: 987 - RNA, 22 nt, Homo sapiens
caaaaguaauugccgguuuuug

SEQ ID NO: 988 - RNA, 22 nt, Homo sapiens
gaaaacgacaaugacuuuugca

SEQ ID NO: 989 - RNA, 22 nt, Homo sapiens
ugcaaaagucauugucguuuuc

SEQ ID NO: 990 - RNA, 21 nt, Homo sapiens
caaaaacugcaauuacuuuca

SEQ ID NO: 991 - RNA, 21 nt, Homo sapiens
ugaaaguaauugcaguuuuug

SEQ ID NO: 992 - RNA, 21 nt, Homo sapiens
aaagguaauugugguuucugc

SEQ ID NO: 993 - RNA, 21 nt, Homo sapiens
gcagaaaccacaauuaccuuu

SEQ ID NO: 994 - RNA, 22 nt, Homo sapiens
caaaaacugcaguuacuuuugc

SEQ ID NO: 995 - RNA, 22 nt, Homo sapiens
gcaaaaguaacugcaguuuuug

SEQ ID NO: 996 - RNA, 20 nt, Homo sapiens
aaaagugauugcaguguuug

SEQ ID NO: 997 - RNA, 20 nt, Homo sapiens
caaacacugcaaucacuuuu

SEQ ID NO: 998 - RNA, 22 nt, Homo sapiens
aaagguaauugcaguuuuuccc

SEQ ID NO: 999 - RNA, 22 nt, Homo sapiens
gggaaaaacugcaauuaccuuu

SEQ ID NO: 1000 - RNA, 21 nt, Homo sapiens
uaaaaacugcaauuacuuuua

SEQ ID NO: 1001 - RNA, 21 nt, Homo sapiens
uaaaaguaauugcaguuuuua

SEQ ID NO: 1002 - RNA, 23 nt, Homo sapiens
ugcaaaaguaauugcaguuuuug

SEQ ID NO: 1003 - RNA, 23 nt, Homo sapiens
caaaaacugcaauuacuuuugca

SEQ ID NO: 1004 - RNA, 21 nt, Homo sapiens
aaaaguaacugcgguuuuuga

SEQ ID NO: 1005 - RNA, 21 nt, Homo sapiens
ucaaaaaccgcaguuacuuuu

SEQ ID NO: 1006 - RNA, 22 nt, Homo sapiens
aacggcaaugacuuuuguacca

SEQ ID NO: 1007 - RNA, 22 nt, Homo sapiens
ugguacaaaagucauugccguu

SEQ ID NO: 1008 - RNA, 22 nt, Homo sapiens
caaaaacugcaguuacuuuugu

SEQ ID NO: 1009 - RNA, 22 nt, Homo sapiens
acaaaaguaacugcaguuuuug

SEQ ID NO: 1010 - RNA, 22 nt, Homo sapiens
aaaaguaauugcgguuuuugcc

SEQ ID NO: 1011 - RNA, 22 nt, Homo sapiens
ggcaaaaaccgcaauuacuuuu

SEQ ID NO: 1012 - RNA, 20 nt, Homo sapiens
aaaaggcauugugguuuuug

SEQ ID NO: 1013 - RNA, 20 nt, Homo sapiens
caaaaaccacaaugccuuuu

SEQ ID NO: 1014 - RNA, 23 nt, Homo sapiens
cggcccgggcugcugcuguuccu

SEQ ID NO: 1015 - RNA, 23 nt, Homo sapiens
aggaacagcagcagcccgggccg

SEQ ID NO: 1016 - RNA, 20 nt, Homo sapiens
agagguauagggcaugggaa

SEQ ID NO: 1017 - RNA, 20 nt, Homo sapiens
uucccaugcccuauaccucu

SEQ ID NO: 1018 - RNA, 22 nt, Homo sapiens
uuccuaugcauauacuucuuug

SEQ ID NO: 1019 - RNA, 22 nt, Homo sapiens
caaagaaguauaugcauaggaa

SEQ ID NO: 1020 - RNA, 22 nt, Homo sapiens
aucauagaggaaaauccauguu

SEQ ID NO: 1021 - RNA, 22 nt, Homo sapiens
aacauggauuuuccucuaugau

SEQ ID NO: 1022 - RNA, 22 nt, Homo sapiens
cguggauauuccuucuauguuu

SEQ ID NO: 1023 - RNA, 22 nt, Homo sapiens
aaacauagaaggaauauccacg

SEQ ID NO: 1024 - RNA, 22 nt, Homo sapiens
ugaguauuacauggccaaucuc

SEQ ID NO: 1025 - RNA, 22 nt, Homo sapiens
gagauuggccauguaauacuca

SEQ ID NO: 1026 - RNA, 21 nt, Homo sapiens
cuuccgccccgccgggcgucg

SEQ ID NO: 1027 - RNA, 21 nt, Homo sapiens
cgacgcccggcggggcggaag

SEQ ID NO: 1028 - RNA, 22 nt, Homo sapiens
uagcuuaucagacugauguuga

SEQ ID NO: 1029 - RNA, 22 nt, Homo sapiens
ucaacaucagucugauaagcua

SEQ ID NO: 1030 - RNA, 22 nt, Homo sapiens
cacuagauugugagcuccugga

SEQ ID NO: 1031 - RNA, 22 nt, Homo sapiens
uccaggagcucacaaucuagug

SEQ ID NO: 1032 - RNA, 22 nt, Homo sapiens
aaggagcucacagucuauugag

SEQ ID NO: 1033 - RNA, 22 nt, Homo sapiens
cucaauagacugugagcuccuu

SEQ ID NO: 1034 - RNA, 22 nt, Homo sapiens
uacgucaucguugucaucguca

SEQ ID NO: 1035 - RNA, 22 nt, Homo sapiens
ugacgaugacaacgaugacgua

SEQ ID NO: 1036 - RNA, 22 nt, Homo sapiens
cacgcucaugcacacacccaca

SEQ ID NO: 1037 - RNA, 22 nt, Homo sapiens
ugugggugugugcaugagcgug

SEQ ID NO: 1038 - RNA, 21 nt, Homo sapiens
caacaccagucgaugggcugu

SEQ ID NO: 1039 - RNA, 21 nt, Homo sapiens
acagcccaucgacugguguug

SEQ ID NO: 1040 - RNA, 22 nt, Homo sapiens
uucaccaccuucuccacccagc

SEQ ID NO: 1041 - RNA, 22 nt, Homo sapiens
gcuggguggagaagguggugaa

SEQ ID NO: 1042 - RNA, 23 nt, Homo sapiens
cggguagagagggcagugggagg

SEQ ID NO: 1043 - RNA, 23 nt, Homo sapiens
ccucccacugcccucucuacccg

SEQ ID NO: 1044 - RNA, 18 nt, Homo sapiens
aauccuugcuaccugggu

SEQ ID NO: 1045 - RNA, 18 nt, Homo sapiens
acccagguagcaaggauu

SEQ ID NO: 1046 - RNA, 22 nt, Homo sapiens
caauuuagugugugugauauuu

SEQ ID NO: 1047 - RNA, 22 nt, Homo sapiens
aaauaucacacacacuaaauug

SEQ ID NO: 1048 - RNA, 22 nt, Homo sapiens
uauugcacauuacuaaguugca

SEQ ID NO: 1049 - RNA, 22 nt, Homo sapiens
ugcaacuuaguaaugugcaaua

SEQ ID NO: 1050 - RNA, 22 nt, Homo sapiens
ccuauucuugauuacuuguuuc

SEQ ID NO: 1051 - RNA, 22 nt, Homo sapiens
gaaacaaguaaucaagaauagg

SEQ ID NO: 1052 - RNA, 22 nt, Homo sapiens
uucaaguaauccaggauaggcu

SEQ ID NO: 1053 - RNA, 22 nt, Homo sapiens
agccuauccuggauuacuugaa

SEQ ID NO: 1054 - RNA, 23 nt, Homo sapiens
ccaguuaccgcuuccgcuaccgc

SEQ ID NO: 1055 - RNA, 23 nt, Homo sapiens
gcgguagcggaagcgguaacugg

SEQ ID NO: 1056 - RNA, 21 nt, Homo sapiens
gauuucaguggagugaaguuc

SEQ ID NO: 1057 - RNA, 21 nt, Homo sapiens
gaacuucacuccacugaaauc

SEQ ID NO: 1058 - RNA, 22 nt, Homo sapiens
uccuucauuccaccggagucug

SEQ ID NO: 1059 - RNA, 22 nt, Homo sapiens
cagacuccgguggaaugaagga

SEQ ID NO: 1060 - RNA, 23 nt, Homo sapiens
aaaauggugcccuagugacuaca

SEQ ID NO: 1061 - RNA, 23 nt, Homo sapiens
uguagucacuagggcaccauuuu

SEQ ID NO: 1062 - RNA, 21 nt, Homo sapiens
caagucacuagugguuccguu

SEQ ID NO: 1063 - RNA, 21 nt, Homo sapiens
aacggaaccacuagugacuug

SEQ ID NO: 1064 - RNA, 22 nt, Homo sapiens
ccaguauuaacugugcugcuga

SEQ ID NO: 1065 - RNA, 22 nt, Homo sapiens
ucagcagcacaguuaauacugg

SEQ ID NO: 1066 - RNA, 23 nt, Homo sapiens
ucccccaggugugauucugauuu

SEQ ID NO: 1067 - RNA, 23 nt, Homo sapiens
aaaucagaaucacaccuggggga

SEQ ID NO: 1068 - RNA, 22 nt, Homo sapiens
aaaagcuggguugagagggcga

SEQ ID NO: 1069 - RNA, 22 nt, Homo sapiens
ucgcccucucaacccagcuuuu

SEQ ID NO: 1070 - RNA, 22 nt, Homo sapiens
uggacggagaacugauaagggu

SEQ ID NO: 1071 - RNA, 22 nt, Homo sapiens
acccuuaucaguucuccgucca

SEQ ID NO: 1072 - RNA, 22 nt, Homo sapiens
uggugggccgcagaacaugugc

SEQ ID NO: 1073 - RNA, 22 nt, Homo sapiens
gcacauguucugcggcccacca

SEQ ID NO: 1074 - RNA, 22 nt, Homo sapiens
agugccugcuaugugccaggca

SEQ ID NO: 1075 - RNA, 22 nt, Homo sapiens
ugccuggcacauagcaggcacu

SEQ ID NO: 1076 - RNA, 22 nt, Homo sapiens
cuuggcaccuagcaagcacuca

SEQ ID NO: 1077 - RNA, 22 nt, Homo sapiens
ugagugcuugcuaggugccaag

SEQ ID NO: 1078 - RNA, 23 nt, Homo sapiens
uuauugcuuaagaauacgcguag

SEQ ID NO: 1079 - RNA, 23 nt, Homo sapiens
cuacgcguauucuuaagcaauaa

SEQ ID NO: 1080 - RNA, 22 nt, Homo sapiens
uugcauagucacaaaagugauc

SEQ ID NO: 1081 - RNA, 22 nt, Homo sapiens
gaucacuuuugugacuaugcaa

SEQ ID NO: 1082 - RNA, 22 nt, Homo sapiens
gugaauuaccgaagggccauaa

SEQ ID NO: 1083 - RNA, 22 nt, Homo sapiens
uuauggcccuucgguaauucac

SEQ ID NO: 1084 - RNA, 22 nt, Homo sapiens
uauggcacugguagaauucacu

SEQ ID NO: 1085 - RNA, 22 nt, Homo sapiens
agugaauucuaccagugccaua

SEQ ID NO: 1086 - RNA, 22 nt, Homo sapiens
ugauauguuugauauauuaggu

SEQ ID NO: 1087 - RNA, 22 nt, Homo sapiens
accuaauauaucaaacauauca

SEQ ID NO: 1088 - RNA, 21 nt, Homo sapiens
ugauauguuugauauuggguu

SEQ ID NO: 1089 - RNA, 21 nt, Homo sapiens
aacccaauaucaaacauauca

SEQ ID NO: 1090 - RNA, 18 nt, Homo sapiens
agcaggugcggggcggcg

SEQ ID NO: 1091 - RNA, 18 nt, Homo sapiens
cgccgccccgcaccugcu

SEQ ID NO: 1092 - RNA, 21 nt, Homo sapiens
cagugcaaguguagaugccga

SEQ ID NO: 1093 - RNA, 21 nt, Homo sapiens
ucggcaucuacacuugcacug

SEQ ID NO: 1094 - RNA, 22 nt, Homo sapiens
uauguaauaugguccacaucuu

SEQ ID NO: 1095 - RNA, 22 nt, Homo sapiens
aagauguggaccauauuacaua

SEQ ID NO: 1096 - RNA, 21 nt, Homo sapiens
aauauaacacagauggccugu

SEQ ID NO: 1097 - RNA, 21 nt, Homo sapiens
acaggccaucuguguuauauu

SEQ ID NO: 1098 - RNA, 22 nt, Homo sapiens
aucgggaaugucguguccgccc

SEQ ID NO: 1099 - RNA, 22 nt, Homo sapiens
gggcggacacgacauucccgau

SEQ ID NO: 1100 - RNA, 23 nt, Homo sapiens
aaugacacgaucacucccguuga

SEQ ID NO: 1101 - RNA, 23 nt, Homo sapiens
ucaacgggagugaucgugucauu

SEQ ID NO: 1102 - RNA, 22 nt, Homo sapiens
uacucaggagaguggcaaucac

SEQ ID NO: 1103 - RNA, 22 nt, Homo sapiens
gugauugccacucuccugagua

SEQ ID NO: 1104 - RNA, 23 nt, Homo sapiens
uggaagacuagugauuuuguugu

SEQ ID NO: 1105 - RNA, 23 nt, Homo sapiens
acaacaaaaucacuagucuucca

SEQ ID NO: 1106 - RNA, 22 nt, Homo sapiens
auaaagcuagauaaccgaaagu

SEQ ID NO: 1107 - RNA, 22 nt, Homo sapiens
acuuucgguuaucuagcuuuau

SEQ ID NO: 1108 - RNA, 23 nt, Homo sapiens
ucuuugguuaucuagcuguauga

SEQ ID NO: 1109 - RNA, 23 nt, Homo sapiens
ucauacagcuagauaaccaaaga

SEQ ID NO: 1110 - RNA, 22 nt, Homo sapiens
acaggugagguucuugggagcc

SEQ ID NO: 1111 - RNA, 22 nt, Homo sapiens
ggcucccaagaaccucaccugu

SEQ ID NO: 1112 - RNA, 24 nt, Homo sapiens
ucccugagacccuuuaaccuguga

SEQ ID NO: 1113 - RNA, 24 nt, Homo sapiens
ucacagguuaaagggucucaggga

SEQ ID NO: 1114 - RNA, 22 nt, Homo sapiens
caacaaaucccagucuaccuaa

SEQ ID NO: 1115 - RNA, 22 nt, Homo sapiens
uuagguagacugggauuuguug

SEQ ID NO: 1116 - RNA, 22 nt, Homo sapiens
cguguucacagcggaccuugau

SEQ ID NO: 1117 - RNA, 22 nt, Homo sapiens
aucaagguccgcugugaacacg

SEQ ID NO: 1118 - RNA, 20 nt, Homo sapiens
uaaggcacgcggugaaugcc

SEQ ID NO: 1119 - RNA, 20 nt, Homo sapiens
ggcauucaccgcgugccuua

SEQ ID NO: 1120 - RNA, 22 nt, Homo sapiens
aacacaccugguuaaccucuuu

SEQ ID NO: 1121 - RNA, 22 nt, Homo sapiens
aaagagguuaaccagguguguu

SEQ ID NO: 1122 - RNA, 22 nt, Homo sapiens
uaacagucuacagccauggucg

SEQ ID NO: 1123 - RNA, 22 nt, Homo sapiens
cgaccauggcuguagacuguua

SEQ ID NO: 1124 - RNA, 22 nt, Homo sapiens
accguggcuuucgauuguuacu

SEQ ID NO: 1125 - RNA, 22 nt, Homo sapiens
aguaacaaucgaaagccacggu

SEQ ID NO: 1126 - RNA, 21 nt, Homo sapiens
uaacagucuccagucacggcc

SEQ ID NO: 1127 - RNA, 21 nt, Homo sapiens
ggccgugacuggagacuguua

SEQ ID NO: 1128 - RNA, 23 nt, Homo sapiens
accuuggcucuagacugcuuacu

SEQ ID NO: 1129 - RNA, 23 nt, Homo sapiens
aguaagcagucuagagccaaggu

SEQ ID NO: 1130 - RNA, 23 nt, Homo sapiens
ucucacacagaaaucgcacccgu

SEQ ID NO: 1131 - RNA, 23 nt, Homo sapiens
acgggugcgauuucugugugaga

SEQ ID NO: 1132 - RNA, 22 nt, Homo sapiens
ugguugaccauagaacaugcgc

SEQ ID NO: 1133 - RNA, 22 nt, Homo sapiens
gcgcauguucuauggucaacca

SEQ ID NO: 1134 - RNA, 23 nt, Homo sapiens
caguaacaaagauucauccuugu

SEQ ID NO: 1135 - RNA, 23 nt, Homo sapiens
acaaggaugaaucuuuguuacug

SEQ ID NO: 1136 - RNA, 22 nt, Homo sapiens
agaguugagucuggacgucccg

SEQ ID NO: 1137 - RNA, 22 nt, Homo sapiens
cgggacguccagacucaacucu

SEQ ID NO: 1138 - RNA, 22 nt, Homo sapiens
agaauuguggcuggacaucugu

SEQ ID NO: 1139 - RNA, 22 nt, Homo sapiens
acagauguccagccacaauucu

SEQ ID NO: 1140 - RNA, 21 nt, Homo sapiens
ugauuguccaaacgcaauucu

SEQ ID NO: 1141 - RNA, 21 nt, Homo sapiens
agaauugcguuuggacaauca

SEQ ID NO: 1142 - RNA, 22 nt, Homo sapiens
uauagggauuggagccguggcg

SEQ ID NO: 1143 - RNA, 22 nt, Homo sapiens
cgccacggcuccaaucccuaua

SEQ ID NO: 1144 - RNA, 23 nt, Homo sapiens
uauggcuuuuuauuccuauguga

SEQ ID NO: 1145 - RNA, 23 nt, Homo sapiens
ucacauaggaauaaaaagccaua

SEQ ID NO: 1146 - RNA, 22 nt, Homo sapiens
auguagggcuaaaagccauggg

SEQ ID NO: 1147 - RNA, 22 nt, Homo sapiens
cccauggcuuuuagcccuacau

SEQ ID NO: 1148 - RNA, 23 nt, Homo sapiens
uauggcuuuucauuccuauguga

SEQ ID NO: 1149 - RNA, 23 nt, Homo sapiens
ucacauaggaaugaaaagccaua

SEQ ID NO: 1150 - RNA, 22 nt, Homo sapiens
aaccaucgaccguugaguggac

SEQ ID NO: 1151 - RNA, 22 nt, Homo sapiens
guccacucaacggucgaugguu

SEQ ID NO: 1152 - RNA, 22 nt, Homo sapiens
aacauucaaccugucggugagu

SEQ ID NO: 1153 - RNA, 22 nt, Homo sapiens
acucaccgacagguugaauguu

SEQ ID NO: 1154 - RNA, 25 nt, Homo sapiens
cuuccagacgcuccgccccacgucg

SEQ ID NO: 1155 - RNA, 25 nt, Homo sapiens
cgacguggggcggagcgucuggaag

SEQ ID NO: 1156 - RNA, 24 nt, Homo sapiens
aacaacaaaaucacuagucuucca

SEQ ID NO: 1157 - RNA, 24 nt, Homo sapiens
uggaagacuagugauuuuguuguu

SEQ ID NO: 1158 - RNA, 22 nt, Homo sapiens
agguagacugggauuuguuguu

SEQ ID NO: 1159 - RNA, 22 nt, Homo sapiens
aacaacaaaucccagucuaccu

SEQ ID NO: 1160 - RNA, 22 nt, Homo sapiens
aaacaccauugucacacuccac

SEQ ID NO: 1161 - RNA, 22 nt, Homo sapiens
guggagugugacaaugguguuu

SEQ ID NO: 1162 - RNA, 23 nt, Homo sapiens
uuuagugugauaauggcguuuga

SEQ ID NO: 1163 - RNA, 23 nt, Homo sapiens
ucaaacgccauuaucacacuaaa

SEQ ID NO: 1164 - RNA, 22 nt, Homo sapiens
uauggaaagacuuugccacucu

SEQ ID NO: 1165 - RNA, 22 nt, Homo sapiens
agaguggcaaagucuuuccaua

SEQ ID NO: 1166 - RNA, 21 nt, Homo sapiens
aguggcaaagucuuuccauau

SEQ ID NO: 1167 - RNA, 21 nt, Homo sapiens
auauggaaagacuuugccacu

SEQ ID NO: 1168 - RNA, 22 nt, Homo sapiens
cagcccggaucccagcccacuu

SEQ ID NO: 1169 - RNA, 22 nt, Homo sapiens
aagugggcugggauccgggcug

SEQ ID NO: 1170 - RNA, 20 nt, Homo sapiens
guggguuggggcgggcucug

SEQ ID NO: 1171 - RNA, 20 nt, Homo sapiens
cagagcccgccccaacccac

SEQ ID NO: 1172 - RNA, 23 nt, Homo sapiens
uucgggcuggccugcugcuccgg

SEQ ID NO: 1173 - RNA, 23 nt, Homo sapiens
ccggagcagcaggccagcccgaa

SEQ ID NO: 1174 - RNA, 21 nt, Homo sapiens
ugugcagcaggccaaccgaga

SEQ ID NO: 1175 - RNA, 21 nt, Homo sapiens
ucucgguuggccugcugcaca

SEQ ID NO: 1176 - RNA, 22 nt, Homo sapiens
cagggcaggaagaaguggacaa

SEQ ID NO: 1177 - RNA, 22 nt, Homo sapiens
uuguccacuucuuccugcccug

SEQ ID NO: 1178 - RNA, 22 nt, Homo sapiens
guccacuucugccugcccugcc

SEQ ID NO: 1179 - RNA, 22 nt, Homo sapiens
ggcagggcaggcagaaguggac

SEQ ID NO: 1180 - RNA, 22 nt, Homo sapiens
uuuggacagaaaacacgcaggu

SEQ ID NO: 1181 - RNA, 22 nt, Homo sapiens
accugcguguuuucuguccaaa

SEQ ID NO: 1182 - RNA, 20 nt, Homo sapiens
ccugcguguuuucuguccaa

SEQ ID NO: 1183 - RNA, 20 nt, Homo sapiens
uuggacagaaaacacgcagg

SEQ ID NO: 1184 - RNA, 22 nt, Homo sapiens
ugccgcccucucgcugcucuag

SEQ ID NO: 1185 - RNA, 22 nt, Homo sapiens
cuagagcagcgagagggcggca

SEQ ID NO: 1186 - RNA, 23 nt, Homo sapiens
gagggcagcguggguguggcgga

SEQ ID NO: 1187 - RNA, 23 nt, Homo sapiens
uccgccacacccacgcugcccuc

SEQ ID NO: 1188 - RNA, 22 nt, Homo sapiens
aggagcuagccaggcauaugca

SEQ ID NO: 1189 - RNA, 22 nt, Homo sapiens
ugcauaugccuggcuagcuccu

SEQ ID NO: 1190 - RNA, 20 nt, Homo sapiens
auaugccuggcuagcuccuc

SEQ ID NO: 1191 - RNA, 20 nt, Homo sapiens
gaggagcuagccaggcauau

SEQ ID NO: 1192 - RNA, 19 nt, Homo sapiens
cggcgcgaccggcccgggg

SEQ ID NO: 1193 - RNA, 19 nt, Homo sapiens
ccccgggccggucgcgccg

SEQ ID NO: 1194 - RNA, 21 nt, Homo sapiens
ucuugaagucagaacccgcaa

SEQ ID NO: 1195 - RNA, 21 nt, Homo sapiens
uugcggguucugacuucaaga

SEQ ID NO: 1196 - RNA, 22 nt, Homo sapiens
aacucguguucaaagccuuuag

SEQ ID NO: 1197 - RNA, 22 nt, Homo sapiens
cuaaaggcuuugaacacgaguu

SEQ ID NO: 1198 - RNA, 23 nt, Homo sapiens
ccuggacaccgcucagccggccg

SEQ ID NO: 1199 - RNA, 23 nt, Homo sapiens
cggccggcugagcgguguccagg

SEQ ID NO: 1200 - RNA, 21 nt, Homo sapiens
acucggcugcgguggacaagu

SEQ ID NO: 1201 - RNA, 21 nt, Homo sapiens
acuuguccaccgcagccgagu

SEQ ID NO: 1202 - RNA, 20 nt, Homo sapiens
ucacucucaccuugcuuugc

SEQ ID NO: 1203 - RNA, 20 nt, Homo sapiens
gcaaagcaaggugagaguga

SEQ ID NO: 1204 - RNA, 22 nt, Homo sapiens
uugcuaaguaggcugagauuga

SEQ ID NO: 1205 - RNA, 22 nt, Homo sapiens
ucaaucucagccuacuuagcaa

SEQ ID NO: 1206 - RNA, 22 nt, Homo sapiens
cacccccuguuuccuggcccac

SEQ ID NO: 1207 - RNA, 22 nt, Homo sapiens
gugggccaggaaacagggggug

SEQ ID NO: 1208 - RNA, 23 nt, Homo sapiens
ugggccagggagcagcugguggg

SEQ ID NO: 1209 - RNA, 23 nt, Homo sapiens
cccaccagcugcucccuggccca

SEQ ID NO: 1210 - RNA, 24 nt, Homo sapiens
ugcccaugccauacuuuugccuca

SEQ ID NO: 1211 - RNA, 24 nt, Homo sapiens
ugaggcaaaaguauggcaugggca

SEQ ID NO: 1212 - RNA, 22 nt, Homo sapiens
auggcaucguccccugguggcu

SEQ ID NO: 1213 - RNA, 22 nt, Homo sapiens
agccaccaggggacgaugccau

SEQ ID NO: 1214 - RNA, 22 nt, Homo sapiens
gacacaugaccauaaaugcuaa

SEQ ID NO: 1215 - RNA, 22 nt, Homo sapiens
uuagcauuuauggucauguguc

SEQ ID NO: 1216 - RNA, 23 nt, Homo sapiens
uggagagagaaaagagacagaag

SEQ ID NO: 1217 - RNA, 23 nt, Homo sapiens
cuucugucucuuuucucucucca

SEQ ID NO: 1218 - RNA, 22 nt, Homo sapiens
agacaguaguucuugccugguu

SEQ ID NO: 1219 - RNA, 22 nt, Homo sapiens
aaccaggcaagaacuacugucu

SEQ ID NO: 1220 - RNA, 19 nt, Homo sapiens
accaggcaagaaauauugu

SEQ ID NO: 1221 - RNA, 19 nt, Homo sapiens
acaauauuucuugccuggu

SEQ ID NO: 1222 - RNA, 21 nt, Homo sapiens
auugucccucucccuucccag

SEQ ID NO: 1223 - RNA, 21 nt, Homo sapiens
cugggaagggagagggacaau

SEQ ID NO: 1224 - RNA, 22 nt, Homo sapiens
acugggaagaggagcugaggga

SEQ ID NO: 1225 - RNA, 22 nt, Homo sapiens
ucccucagcuccucuucccagu

SEQ ID NO: 1226 - RNA, 23 nt, Homo sapiens
gaagauggugcugugcugaggaa

SEQ ID NO: 1227 - RNA, 23 nt, Homo sapiens
uuccucagcacagcaccaucuuc

SEQ ID NO: 1228 - RNA, 20 nt, Homo sapiens
ugugggacugcaaaugggag

SEQ ID NO: 1229 - RNA, 20 nt, Homo sapiens
cucccauuugcagucccaca

SEQ ID NO: 1230 - RNA, 21 nt, Homo sapiens
ucugaggccugccucucccca

SEQ ID NO: 1231 - RNA, 21 nt, Homo sapiens
uggggagaggcaggccucaga

SEQ ID NO: 1232 - RNA, 24 nt, Homo sapiens
ugggcgaggggugggcucucagag

SEQ ID NO: 1233 - RNA, 24 nt, Homo sapiens
cucugagagcccaccccucgccca

SEQ ID NO: 1234 - RNA, 21 nt, Homo sapiens
agguagaaugaggccugacau

SEQ ID NO: 1235 - RNA, 21 nt, Homo sapiens
augucaggccucauucuaccu

SEQ ID NO: 1236 - RNA, 19 nt, Homo sapiens
ucaggccucuuucuaccuu

SEQ ID NO: 1237 - RNA, 19 nt, Homo sapiens
aagguagaaagaggccuga

SEQ ID NO: 1238 - RNA, 20 nt, Homo sapiens
cggggugggugaggucgggc

SEQ ID NO: 1239 - RNA, 20 nt, Homo sapiens
gcccgaccucacccaccccg

SEQ ID NO: 1240 - RNA, 22 nt, Homo sapiens
guucuguuaacccauccccuca

SEQ ID NO: 1241 - RNA, 22 nt, Homo sapiens
ugaggggauggguuaacagaac

SEQ ID NO: 1242 - RNA, 22 nt, Homo sapiens
aggggacugguuaauagaacua

SEQ ID NO: 1243 - RNA, 22 nt, Homo sapiens
uaguucuauuaaccaguccccu

SEQ ID NO: 1244 - RNA, 23 nt, Homo sapiens
uggaguuaaggguugcuuggaga

SEQ ID NO: 1245 - RNA, 23 nt, Homo sapiens
ucuccaagcaacccuuaacucca

SEQ ID NO: 1246 - RNA, 22 nt, Homo sapiens
ucucugagcaaggcuuaacacc

SEQ ID NO: 1247 - RNA, 22 nt, Homo sapiens
gguguuaagccuugcucagaga

SEQ ID NO: 1248 - RNA, 22 nt, Homo sapiens
ugugggaucuggaggcaucugg

SEQ ID NO: 1249 - RNA, 22 nt, Homo sapiens
ccagaugccuccagaucccaca

SEQ ID NO: 1250 - RNA, 21 nt, Homo sapiens
acccucgucagguccccgggg

SEQ ID NO: 1251 - RNA, 21 nt, Homo sapiens
ccccggggaccugacgagggu

SEQ ID NO: 1252 - RNA, 22 nt, Homo sapiens
caccggggauggcagagggucg

SEQ ID NO: 1253 - RNA, 22 nt, Homo sapiens
cgacccucugccauccccggug

SEQ ID NO: 1254 - RNA, 23 nt, Homo sapiens
ugggcugagggcaggaggccugu

SEQ ID NO: 1255 - RNA, 23 nt, Homo sapiens
acaggccuccugcccucagccca

SEQ ID NO: 1256 - RNA, 23 nt, Homo sapiens
aauguggaaguggucugaggcau

SEQ ID NO: 1257 - RNA, 23 nt, Homo sapiens
augccucagaccacuuccacauu

SEQ ID NO: 1258 - RNA, 23 nt, Homo sapiens
gugaguguggauccuggaggaau

SEQ ID NO: 1259 - RNA, 23 nt, Homo sapiens
auuccuccaggauccacacucac

SEQ ID NO: 1260 - RNA, 22 nt, Homo sapiens
uuucuucuuagacauggcaacg

SEQ ID NO: 1261 - RNA, 22 nt, Homo sapiens
cguugccaugucuaagaagaaa

SEQ ID NO: 1262 - RNA, 22 nt, Homo sapiens
cugccaugucuaagaagaaaac

SEQ ID NO: 1263 - RNA, 22 nt, Homo sapiens
guuuucuucuuagacauggcag

SEQ ID NO: 1264 - RNA, 22 nt, Homo sapiens
uuucuucuuagacauggcagcu

SEQ ID NO: 1265 - RNA, 22 nt, Homo sapiens
agcugccaugucuaagaagaaa

SEQ ID NO: 1266 - RNA, 19 nt, Homo sapiens
uugccaugucuaagaagaa

SEQ ID NO: 1267 - RNA, 19 nt, Homo sapiens
uucuucuuagacauggcaa

SEQ ID NO: 1268 - RNA, 23 nt, Homo sapiens
ugcagcucugguggaaaauggag

SEQ ID NO: 1269 - RNA, 23 nt, Homo sapiens
cuccauuuuccaccagagcugca

SEQ ID NO: 1270 - RNA, 22 nt, Homo sapiens
caggauccacagagcuagucca

SEQ ID NO: 1271 - RNA, 22 nt, Homo sapiens
uggacuagcucuguggauccug

SEQ ID NO: 1272 - RNA, 22 nt, Homo sapiens
aacuagcucuguggauccugac

SEQ ID NO: 1273 - RNA, 22 nt, Homo sapiens
gucaggauccacagagcuaguu

SEQ ID NO: 1274 - RNA, 22 nt, Homo sapiens
aaagauggacaauuggcuaaau

SEQ ID NO: 1275 - RNA, 22 nt, Homo sapiens
auuuagccaauuguccaucuuu

SEQ ID NO: 1276 - RNA, 24 nt, Homo sapiens
agcugagcuccauggacgugcagu

SEQ ID NO: 1277 - RNA, 24 nt, Homo sapiens
acugcacguccauggagcucagcu

SEQ ID NO: 1278 - RNA, 22 nt, Homo sapiens
cuuccggucugugagccccguc

SEQ ID NO: 1279 - RNA, 22 nt, Homo sapiens
gacggggcucacagaccggaag

SEQ ID NO: 1280 - RNA, 22 nt, Homo sapiens
uggggugcccacuccgcaaguu

SEQ ID NO: 1281 - RNA, 22 nt, Homo sapiens
aacuugcggagugggcacccca

SEQ ID NO: 1282 - RNA, 26 nt, Homo sapiens
cucggccgcggcgcguagcccccgcc

SEQ ID NO: 1283 - RNA, 26 nt, Homo sapiens
ggcgggggcuacgcgccgcggccgag

SEQ ID NO: 1284 - RNA, 23 nt, Homo sapiens
cugggggacgcgugagcgcgagc

SEQ ID NO: 1285 - RNA, 23 nt, Homo sapiens
gcucgcgcucacgcgucccccag

SEQ ID NO: 1286 - RNA, 21 nt, Homo sapiens
cauacaaucugacauguauuu

SEQ ID NO: 1287 - RNA, 21 nt, Homo sapiens
aaauacaugucagauuguaug

SEQ ID NO: 1288 - RNA, 21 nt, Homo sapiens
auacaugucagauuguaugcc

SEQ ID NO: 1289 - RNA, 21 nt, Homo sapiens
ggcauacaaucugacauguau

SEQ ID NO: 1290 - RNA, 21 nt, Homo sapiens
ucccuccuucuguccccacag

SEQ ID NO: 1291 - RNA, 21 nt, Homo sapiens
cuguggggacagaaggaggga

SEQ ID NO: 1292 - RNA, 22 nt, Homo sapiens
acuggggagcagaaggagaacc

SEQ ID NO: 1293 - RNA, 22 nt, Homo sapiens
gguucuccuucugcuccccagu

SEQ ID NO: 1294 - RNA, 23 nt, Homo sapiens
gaaaauccuuuuuguuuuuccag

SEQ ID NO: 1295 - RNA, 23 nt, Homo sapiens
cuggaaaaacaaaaaggauuuuc

SEQ ID NO: 1296 - RNA, 23 nt, Homo sapiens
agggaaaaaaaaaaggauuuguc

SEQ ID NO: 1297 - RNA, 23 nt, Homo sapiens
gacaaauccuuuuuuuuuucccu

SEQ ID NO: 1298 - RNA, 22 nt, Homo sapiens
uguguccgggaaguggaggagg

SEQ ID NO: 1299 - RNA, 22 nt, Homo sapiens
ccuccuccacuucccggacaca

SEQ ID NO: 1300 - RNA, 22 nt, Homo sapiens
ugaaguuacaucauggucgcuu

SEQ ID NO: 1301 - RNA, 22 nt, Homo sapiens
aagcgaccaugauguaacuuca

SEQ ID NO: 1302 - RNA, 22 nt, Homo sapiens
aagcgaccaugauguaacuuca

SEQ ID NO: 1303 - RNA, 22 nt, Homo sapiens
ugaaguuacaucauggucgcuu

SEQ ID NO: 1304 - RNA, 21 nt, Homo sapiens
uuagugcauagucuuuggucu

SEQ ID NO: 1305 - RNA, 21 nt, Homo sapiens
agaccaaagacuaugcacuaa

SEQ ID NO: 1306 - RNA, 22 nt, Homo sapiens
accgaagacugugcgcuaaucu

SEQ ID NO: 1307 - RNA, 22 nt, Homo sapiens
agauuagcgcacagucuucggu

SEQ ID NO: 1308 - RNA, 21 nt, Homo sapiens
uuacacagcuggacagaggca

SEQ ID NO: 1309 - RNA, 21 nt, Homo sapiens
ugccucuguccagcuguguaa

SEQ ID NO: 1310 - RNA, 22 nt, Homo sapiens
uccaggcaggagccggacugga

SEQ ID NO: 1311 - RNA, 22 nt, Homo sapiens
uccaguccggcuccugccugga

SEQ ID NO: 1312 - RNA, 21 nt, Homo sapiens
cugggcucgggacgcgcggcu

SEQ ID NO: 1313 - RNA, 21 nt, Homo sapiens
agccgcgcgucccgagcccag

SEQ ID NO: 1314 - RNA, 22 nt, Homo sapiens
ggggcugugauugaccagcagg

SEQ ID NO: 1315 - RNA, 22 nt, Homo sapiens
ccugcuggucaaucacagcccc

SEQ ID NO: 1316 - RNA, 22 nt, Homo sapiens
cacuguuucaccacuggcucuu

SEQ ID NO: 1317 - RNA, 22 nt, Homo sapiens
aagagccaguggugaaacagug

SEQ ID NO: 1318 - RNA, 21 nt, Homo sapiens
gagccaguggugagacaguga

SEQ ID NO: 1319 - RNA, 21 nt, Homo sapiens
ucacugucucaccacuggcuc

SEQ ID NO: 1320 - RNA, 22 nt, Homo sapiens
aagguauuguucagacuuauga

SEQ ID NO: 1321 - RNA, 22 nt, Homo sapiens
ucauaagucugaacaauaccuu

SEQ ID NO: 1322 - RNA, 22 nt, Homo sapiens
ucugugauagagauucuuugcu

SEQ ID NO: 1323 - RNA, 22 nt, Homo sapiens
agcaaagaaucucuaucacaga

SEQ ID NO: 1324 - RNA, 21 nt, Homo sapiens
ucugaauuguaagaguuguua

SEQ ID NO: 1325 - RNA, 21 nt, Homo sapiens
uaacaacucuuacaauucaga

SEQ ID NO: 1326 - RNA, 23 nt, Homo sapiens
agaacucuugcagucuuagaugu

SEQ ID NO: 1327 - RNA, 23 nt, Homo sapiens
acaucuaagacugcaagaguucu

SEQ ID NO: 1328 - RNA, 22 nt, Homo sapiens
aacgggaaugcaggcuguaucu

SEQ ID NO: 1329 - RNA, 22 nt, Homo sapiens
agauacagccugcauucccguu

SEQ ID NO: 1330 - RNA, 23 nt, Homo sapiens
ucugaguuccuggagccuggucu

SEQ ID NO: 1331 - RNA, 23 nt, Homo sapiens
agaccaggcuccaggaacucaga

SEQ ID NO: 1332 - RNA, 23 nt, Homo sapiens
uggagauccagugcucgcccgau

SEQ ID NO: 1333 - RNA, 23 nt, Homo sapiens
aucgggcgagcacuggaucucca

SEQ ID NO: 1334 - RNA, 22 nt, Homo sapiens
uguugcaagucgguggagacgu

SEQ ID NO: 1335 - RNA, 22 nt, Homo sapiens
acgucuccaccgacuugcaaca

SEQ ID NO: 1336 - RNA, 22 nt, Homo sapiens
cucucuacugacuugcaacaua

SEQ ID NO: 1337 - RNA, 22 nt, Homo sapiens
uauguugcaagucaguagagag

SEQ ID NO: 1338 - RNA, 22 nt, Homo sapiens
ucucccuuccugcccuggcuag

SEQ ID NO: 1339 - RNA, 22 nt, Homo sapiens
cuagccagggcaggaagggaga

SEQ ID NO: 1340 - RNA, 26 nt, Homo sapiens
cccagggcuuggaguggggcaagguu

SEQ ID NO: 1341 - RNA, 26 nt, Homo sapiens
aaccuugccccacuccaagcccuggg

SEQ ID NO: 1342 - RNA, 23 nt, Homo sapiens
uaucugcugggcuuucugguguu

SEQ ID NO: 1343 - RNA, 23 nt, Homo sapiens
aacaccagaaagcccagcagaua

SEQ ID NO: 1344 - RNA, 21 nt, Homo sapiens
uggcuguuggagggggcaggc

SEQ ID NO: 1345 - RNA, 21 nt, Homo sapiens
gccugcccccuccaacagcca

SEQ ID NO: 1346 - RNA, 22 nt, Homo sapiens
cagcccuccucccgcacccaaa

SEQ ID NO: 1347 - RNA, 22 nt, Homo sapiens
uuugggugcgggaggagggcug

SEQ ID NO: 1348 - RNA, 22 nt, Homo sapiens
uaggggcagcagaggaccuggg

SEQ ID NO: 1349 - RNA, 22 nt, Homo sapiens
cccagguccucugcugccccua

SEQ ID NO: 1350 - RNA, 22 nt, Homo sapiens
uugaggagacauggugggggcc

SEQ ID NO: 1351 - RNA, 22 nt, Homo sapiens
ggcccccaccaugucuccucaa

SEQ ID NO: 1352 - RNA, 21 nt, Homo sapiens
gcagcccagcugaggccucug

SEQ ID NO: 1353 - RNA, 21 nt, Homo sapiens
cagaggccucagcugggcugc

SEQ ID NO: 1354 - RNA, 22 nt, Homo sapiens
gagcaggcgaggcugggcugaa

SEQ ID NO: 1355 - RNA, 22 nt, Homo sapiens
uucagcccagccucgccugcuc

SEQ ID NO: 1356 - RNA, 23 nt, Homo sapiens
ccagccacggacugagagugcau

SEQ ID NO: 1357 - RNA, 23 nt, Homo sapiens
augcacucucaguccguggcugg

SEQ ID NO: 1358 - RNA, 23 nt, Homo sapiens
guccuccaggccaugagcugcgg

SEQ ID NO: 1359 - RNA, 23 nt, Homo sapiens
ccgcagcucauggccuggaggac

SEQ ID NO: 1360 - RNA, 22 nt, Homo sapiens
ucaggcaguguggguaucagau

SEQ ID NO: 1361 - RNA, 22 nt, Homo sapiens
aucugauacccacacugccuga

SEQ ID NO: 1362 - RNA, 23 nt, Homo sapiens
ugagaguggaauucacaguauuu

SEQ ID NO: 1363 - RNA, 23 nt, Homo sapiens
aaauacugugaauuccacucuca

SEQ ID NO: 1364 - RNA, 23 nt, Homo sapiens
auacugugaauuucacugucaca

SEQ ID NO: 1365 - RNA, 23 nt, Homo sapiens
ugugacagugaaauucacaguau

SEQ ID NO: 1366 - RNA, 21 nt, Homo sapiens
caaauggacaggauaacaccu

SEQ ID NO: 1367 - RNA, 21 nt, Homo sapiens
agguguuauccuguccauuug

SEQ ID NO: 1368 - RNA, 22 nt, Homo sapiens
agguguuauccuauccauuugc

SEQ ID NO: 1369 - RNA, 22 nt, Homo sapiens
gcaaauggauaggauaacaccu

SEQ ID NO: 1370 - RNA, 22 nt, Homo sapiens
ugaucucaccgcugccuccuuc

SEQ ID NO: 1371 - RNA, 22 nt, Homo sapiens
gaaggaggcagcggugagauca

SEQ ID NO: 1372 - RNA, 22 nt, Homo sapiens
caggaggcagugggcgagcagg

SEQ ID NO: 1373 - RNA, 22 nt, Homo sapiens
ccugcucgcccacugccuccug

SEQ ID NO: 1374 - RNA, 22 nt, Homo sapiens
ugcaagacggauacugucaucu

SEQ ID NO: 1375 - RNA, 22 nt, Homo sapiens
agaugacaguauccgucuugca

SEQ ID NO: 1376 - RNA, 24 nt, Homo sapiens
ugucagugacuccugccccuuggu

SEQ ID NO: 1377 - RNA, 24 nt, Homo sapiens
accaaggggcaggagucacugaca

SEQ ID NO: 1378 - RNA, 22 nt, Homo sapiens
agggggcgcagucacugacgug

SEQ ID NO: 1379 - RNA, 22 nt, Homo sapiens
cacgucagugacugcgcccccu

SEQ ID NO: 1380 - RNA, 23 nt, Homo sapiens
ucaaaauguagaggaagacccca

SEQ ID NO: 1381 - RNA, 23 nt, Homo sapiens
uggggucuuccucuacauuuuga

SEQ ID NO: 1382 - RNA, 22 nt, Homo sapiens
aauuuacucugcaaucuucucc

SEQ ID NO: 1383 - RNA, 22 nt, Homo sapiens
ggagaagauugcagaguaaauu

SEQ ID NO: 1384 - RNA, 22 nt, Homo sapiens
agaagauugcagaguaaguucc

SEQ ID NO: 1385 - RNA, 22 nt, Homo sapiens
ggaacuuacucugcaaucuucu

SEQ ID NO: 1386 - RNA, 26 nt, Homo sapiens
cacaggacugacuccucaccccagug

SEQ ID NO: 1387 - RNA, 26 nt, Homo sapiens
cacuggggugaggagucaguccugug

SEQ ID NO: 1388 - RNA, 22 nt, Homo sapiens
ucuggggaugaggacagugugu

SEQ ID NO: 1389 - RNA, 22 nt, Homo sapiens
acacacuguccucauccccaga

SEQ ID NO: 1390 - RNA, 20 nt, Homo sapiens
augggugauggguguggugu

SEQ ID NO: 1391 - RNA, 20 nt, Homo sapiens
acaccacacccaucacccau

SEQ ID NO: 1392 - RNA, 22 nt, Homo sapiens
uuggccaccacaccuaccccuu

SEQ ID NO: 1393 - RNA, 22 nt, Homo sapiens
aagggguaggugugguggccaa

SEQ ID NO: 1394 - RNA, 22 nt, Homo sapiens
uguaguuguauuguauugccac

SEQ ID NO: 1395 - RNA, 22 nt, Homo sapiens
guggcaauacaauacaacuaca

SEQ ID NO: 1396 - RNA, 23 nt, Homo sapiens
uagcaauacaguacaaauauagu

SEQ ID NO: 1397 - RNA, 23 nt, Homo sapiens
acuauauuuguacuguauugcua

SEQ ID NO: 1398 - RNA, 22 nt, Homo sapiens
ucagucacauaucuagugucua

SEQ ID NO: 1399 - RNA, 22 nt, Homo sapiens
uagacacuagauaugugacuga

SEQ ID NO: 1400 - RNA, 22 nt, Homo sapiens
gacacuaggcaugugagugauu

SEQ ID NO: 1401 - RNA, 22 nt, Homo sapiens
aaucacucacaugccuaguguc

SEQ ID NO: 1402 - RNA, 22 nt, Homo sapiens
ucaaucacuugguaauugcugu

SEQ ID NO: 1403 - RNA, 22 nt, Homo sapiens
acagcaauuaccaagugauuga

SEQ ID NO: 1404 - RNA, 25 nt, Homo sapiens
agcggggaggaagugggcgcugcuu

SEQ ID NO: 1405 - RNA, 25 nt, Homo sapiens
aagcagcgcccacuuccuccccgcu

SEQ ID NO: 1406 - RNA, 22 nt, Homo sapiens
agcccgccccagccgagguucu

SEQ ID NO: 1407 - RNA, 22 nt, Homo sapiens
agaaccucggcuggggcgggcu

SEQ ID NO: 1408 - RNA, 23 nt, Homo sapiens
gccccggcgcgggcggguucugg

SEQ ID NO: 1409 - RNA, 23 nt, Homo sapiens
ccagaacccgcccgcgccggggc

SEQ ID NO: 1410 - RNA, 22 nt, Homo sapiens
agcaaggcggcaucucucugau

SEQ ID NO: 1411 - RNA, 22 nt, Homo sapiens
aucagagagaugccgccuugcu

SEQ ID NO: 1412 - RNA, 21 nt, Homo sapiens
agagaugccgccuugcuccuu

SEQ ID NO: 1413 - RNA, 21 nt, Homo sapiens
aaggagcaaggcggcaucucu

SEQ ID NO: 1414 - RNA, 23 nt, Homo sapiens
uugaagaggaggugcucuguagc

SEQ ID NO: 1415 - RNA, 23 nt, Homo sapiens
gcuacagagcaccuccucuucaa

SEQ ID NO: 1416 - RNA, 22 nt, Homo sapiens
acaacagugacuugcucuccaa

SEQ ID NO: 1417 - RNA, 22 nt, Homo sapiens
uuggagagcaagucacuguugu

SEQ ID NO: 1418 - RNA, 18 nt, Homo sapiens
gggugagggcaggugguu

SEQ ID NO: 1419 - RNA, 18 nt, Homo sapiens
aaccaccugcccucaccc

SEQ ID NO: 1420 - RNA, 18 nt, Homo sapiens
cgugucuucuggcuugau

SEQ ID NO: 1421 - RNA, 18 nt, Homo sapiens
aucaagccagaagacacg

SEQ ID NO: 1422 - RNA, 23 nt, Homo sapiens
ugcaucaggccagaagacaugag

SEQ ID NO: 1423 - RNA, 23 nt, Homo sapiens
cucaugucuucuggccugaugca

SEQ ID NO: 1424 - RNA, 21 nt, Homo sapiens
aaugagagaccuguacuguau

SEQ ID NO: 1425 - RNA, 21 nt, Homo sapiens
auacaguacaggucucucauu

SEQ ID NO: 1426 - RNA, 22 nt, Homo sapiens
uccaguacaggucucucauuuc

SEQ ID NO: 1427 - RNA, 22 nt, Homo sapiens
gaaaugagagaccuguacugga

SEQ ID NO: 1428 - RNA, 22 nt, Homo sapiens
ugggauccagacagugggagaa

SEQ ID NO: 1429 - RNA, 22 nt, Homo sapiens
uucucccacugucuggauccca

SEQ ID NO: 1430 - RNA, 22 nt, Homo sapiens
uucucccacuaccaggcuccca

SEQ ID NO: 1431 - RNA, 22 nt, Homo sapiens
ugggagccugguagugggagaa

SEQ ID NO: 1432 - RNA, 22 nt, Homo sapiens
ccaaccuagguggucagaguug

SEQ ID NO: 1433 - RNA, 22 nt, Homo sapiens
caacucugaccaccuagguugg

SEQ ID NO: 1434 - RNA, 22 nt, Homo sapiens
aacucugaccccuuagguugau

SEQ ID NO: 1435 - RNA, 22 nt, Homo sapiens
aucaaccuaaggggucagaguu

SEQ ID NO: 1436 - RNA, 23 nt, Homo sapiens
gugccaccuuaacugcagccaau

SEQ ID NO: 1437 - RNA, 23 nt, Homo sapiens
auuggcugcaguuaagguggcac

SEQ ID NO: 1438 - RNA, 22 nt, Homo sapiens
aaguuggcugcaguuaaggugg

SEQ ID NO: 1439 - RNA, 22 nt, Homo sapiens
ccaccuuaacugcagccaacuu

SEQ ID NO: 1440 - RNA, 22 nt, Homo sapiens
aagggggaaggaaacauggaga

SEQ ID NO: 1441 - RNA, 22 nt, Homo sapiens
ucuccauguuuccuucccccuu

SEQ ID NO: 1442 - RNA, 22 nt, Homo sapiens
uccauguuuccuucccccuucu

SEQ ID NO: 1443 - RNA, 22 nt, Homo sapiens
agaagggggaaggaaacaugga

SEQ ID NO: 1444 - RNA, 21 nt, Homo sapiens
acacauggguggcuguggccu

SEQ ID NO: 1445 - RNA, 21 nt, Homo sapiens
aggccacagccacccaugugu

SEQ ID NO: 1446 - RNA, 22 nt, Homo sapiens
uaggccacagccacccaugugu

SEQ ID NO: 1447 - RNA, 22 nt, Homo sapiens
acacauggguggcuguggccua

SEQ ID NO: 1448 - RNA, 21 nt, Homo sapiens
agcuguaccugaaaccaagca

SEQ ID NO: 1449 - RNA, 21 nt, Homo sapiens
ugcuugguuucagguacagcu

SEQ ID NO: 1450 - RNA, 22 nt, Homo sapiens
ucacaaaucuauaauaugcagg

SEQ ID NO: 1451 - RNA, 22 nt, Homo sapiens
ccugcauauuauagauuuguga

SEQ ID NO: 1452 - RNA, 21 nt, Homo sapiens
ugcuuaaguuguaccaaguau

SEQ ID NO: 1453 - RNA, 21 nt, Homo sapiens
auacuugguacaacuuaagca

SEQ ID NO: 1454 - RNA, 22 nt, Homo sapiens
ccuggcauauuugguauaacuu

SEQ ID NO: 1455 - RNA, 22 nt, Homo sapiens
aaguuauaccaaauaugccagg

SEQ ID NO: 1456 - RNA, 22 nt, Homo sapiens
ugagggcuccaggugacggugg

SEQ ID NO: 1457 - RNA, 22 nt, Homo sapiens
ccaccgucaccuggagcccuca

SEQ ID NO: 1458 - RNA, 22 nt, Homo sapiens
accugccagcaccucccugcag

SEQ ID NO: 1459 - RNA, 22 nt, Homo sapiens
cugcagggaggugcuggcaggu

SEQ ID NO: 1460 - RNA, 23 nt, Homo sapiens
ggcaggagggcugugccagguug

SEQ ID NO: 1461 - RNA, 23 nt, Homo sapiens
caaccuggcacagcccuccugcc

SEQ ID NO: 1462 - RNA, 22 nt, Homo sapiens
cccucucuggcuccuccccaaa

SEQ ID NO: 1463 - RNA, 22 nt, Homo sapiens
uuuggggaggagccagagaggg

SEQ ID NO: 1464 - RNA, 24 nt, Homo sapiens
ugggggagccaugagauaagagca

SEQ ID NO: 1465 - RNA, 24 nt, Homo sapiens
ugcucuuaucucauggcuccccca

SEQ ID NO: 1466 - RNA, 21 nt, Homo sapiens
guaccuucugguucagcuagu

SEQ ID NO: 1467 - RNA, 21 nt, Homo sapiens
acuagcugaaccagaagguac

SEQ ID NO: 1468 - RNA, 23 nt, Homo sapiens
aacugaaccaggagugagcuucg

SEQ ID NO: 1469 - RNA, 23 nt, Homo sapiens
cgaagcucacuccugguucaguu

SEQ ID NO: 1470 - RNA, 22 nt, Homo sapiens
uggggaaggcgucagugucggg

SEQ ID NO: 1471 - RNA, 22 nt, Homo sapiens
cccgacacugacgccuucccca

SEQ ID NO: 1472 - RNA, 21 nt, Homo sapiens
agacccugcagccuucccacc

SEQ ID NO: 1473 - RNA, 21 nt, Homo sapiens
ggugggaaggcugcagggucu

SEQ ID NO: 1474 - RNA, 22 nt, Homo sapiens
acccagguucccucuggccgca

SEQ ID NO: 1475 - RNA, 22 nt, Homo sapiens
ugcggccagagggaaccugggu

SEQ ID NO: 1476 - RNA, 23 nt, Homo sapiens
agggccagaggagccuggagugg

SEQ ID NO: 1477 - RNA, 23 nt, Homo sapiens
ccacuccaggcuccucuggcccu

SEQ ID NO: 1478 - RNA, 22 nt, Homo sapiens
auagugggaagcuggcagauuc

SEQ ID NO: 1479 - RNA, 22 nt, Homo sapiens
gaaucugccagcuucccacuau

SEQ ID NO: 1480 - RNA, 21 nt, Homo sapiens
aucugccagcuuccacagugg

SEQ ID NO: 1481 - RNA, 21 nt, Homo sapiens
ccacuguggaagcuggcagau

SEQ ID NO: 1482 - RNA, 25 nt, Homo sapiens
caugcugaccucccuccugccccag

SEQ ID NO: 1483 - RNA, 25 nt, Homo sapiens
cuggggcaggagggaggucagcaug

SEQ ID NO: 1484 - RNA, 23 nt, Homo sapiens
ugggaggggagaggcagcaagca

SEQ ID NO: 1485 - RNA, 23 nt, Homo sapiens
ugcuugcugccucuccccuccca

SEQ ID NO: 1486 - RNA, 22 nt, Homo sapiens
ucauuuaucuguugggaagcua

SEQ ID NO: 1487 - RNA, 22 nt, Homo sapiens
uagcuucccaacagauaaauga

SEQ ID NO: 1488 - RNA, 23 nt, Homo sapiens
cuggcggagcccauuccaugcca

SEQ ID NO: 1489 - RNA, 23 nt, Homo sapiens
uggcauggaaugggcuccgccag

SEQ ID NO: 1490 - RNA, 22 nt, Homo sapiens
cacacaaguggcccccaacacu

SEQ ID NO: 1491 - RNA, 22 nt, Homo sapiens
aguguugggggccacuugugug

SEQ ID NO: 1492 - RNA, 22 nt, Homo sapiens
ugcugggggccacaugagugug

SEQ ID NO: 1493 - RNA, 22 nt, Homo sapiens
cacacucauguggcccccagca

SEQ ID NO: 1494 - RNA, 21 nt, Homo sapiens
gcccugaccuguccuguucug

SEQ ID NO: 1495 - RNA, 21 nt, Homo sapiens
cagaacaggacaggucagggc

SEQ ID NO: 1496 - RNA, 23 nt, Homo sapiens
uguagagcagggagcaggaagcu

SEQ ID NO: 1497 - RNA, 23 nt, Homo sapiens
agcuuccugcucccugcucuaca

SEQ ID NO: 1498 - RNA, 22 nt, Homo sapiens
ccaccaggucuagcauugggau

SEQ ID NO: 1499 - RNA, 22 nt, Homo sapiens
aucccaaugcuagaccuggugg

SEQ ID NO: 1500 - RNA, 22 nt, Homo sapiens
aaucccaaugcuagacccggug

SEQ ID NO: 1501 - RNA, 22 nt, Homo sapiens
caccgggucuagcauugggauu

SEQ ID NO: 1502 - RNA, 22 nt, Homo sapiens
gcugcgggcugcggucagggcg

SEQ ID NO: 1503 - RNA, 22 nt, Homo sapiens
cgcccugaccgcagcccgcagc

SEQ ID NO: 1504 - RNA, 21 nt, Homo sapiens
aaaggugcucaaauuagacau

SEQ ID NO: 1505 - RNA, 21 nt, Homo sapiens
augucuaauuugagcaccuuu

SEQ ID NO: 1506 - RNA, 22 nt, Homo sapiens
ccuaauuugaacaccuucggua

SEQ ID NO: 1507 - RNA, 22 nt, Homo sapiens
uaccgaagguguucaaauuagg

SEQ ID NO: 1508 - RNA, 19 nt, Homo sapiens
aggcagguuaucugggcug

SEQ ID NO: 1509 - RNA, 19 nt, Homo sapiens
cagcccagauaaccugccu

SEQ ID NO: 1510 - RNA, 20 nt, Homo sapiens
augcgaggaugcugacagug

SEQ ID NO: 1511 - RNA, 20 nt, Homo sapiens
cacugucagcauccucgcau

SEQ ID NO: 1512 - RNA, 22 nt, Homo sapiens
ugaaacuggagcgccuggagga

SEQ ID NO: 1513 - RNA, 22 nt, Homo sapiens
uccuccaggcgcuccaguuuca

SEQ ID NO: 1514 - RNA, 22 nt, Homo sapiens
accagcgcguuuucaguuucau

SEQ ID NO: 1515 - RNA, 22 nt, Homo sapiens
augaaacugaaaacgcgcuggu

SEQ ID NO: 1516 - RNA, 25 nt, Homo sapiens
aagggaggaggagcggaggggcccu

SEQ ID NO: 1517 - RNA, 25 nt, Homo sapiens
agggccccuccgcuccuccucccuu

SEQ ID NO: 1518 - RNA, 22 nt, Homo sapiens
gcccgagaggauccgucccugc

SEQ ID NO: 1519 - RNA, 22 nt, Homo sapiens
gcagggacggauccucucgggc

SEQ ID NO: 1520 - RNA, 22 nt, Homo sapiens
aggacugauccucucgggcagg

SEQ ID NO: 1521 - RNA, 22 nt, Homo sapiens
ccugcccgagaggaucaguccu

SEQ ID NO: 1522 - RNA, 23 nt, Homo sapiens
ucaggcaaagggauauuuacaga

SEQ ID NO: 1523 - RNA, 23 nt, Homo sapiens
ucuguaaauaucccuuugccuga

SEQ ID NO: 1524 - RNA, 21 nt, Homo sapiens
uuucugucuuuucugguccag

SEQ ID NO: 1525 - RNA, 21 nt, Homo sapiens
cuggaccagaaaagacagaaa

SEQ ID NO: 1526 - RNA, 23 nt, Homo sapiens
uggccggaugggacaggaggcau

SEQ ID NO: 1527 - RNA, 23 nt, Homo sapiens
augccuccugucccauccggcca

SEQ ID NO: 1528 - RNA, 23 nt, Homo sapiens
ucuaaagacuagacuucgcuaug

SEQ ID NO: 1529 - RNA, 23 nt, Homo sapiens
cauagcgaagucuagucuuuaga

SEQ ID NO: 1530 - RNA, 23 nt, Homo sapiens
uggcccggcgacgucucacgguc

SEQ ID NO: 1531 - RNA, 23 nt, Homo sapiens
gaccgugagacgucgccgggcca

SEQ ID NO: 1532 - RNA, 23 nt, Homo sapiens
ugaguggggcucccgggacggcg

SEQ ID NO: 1533 - RNA, 23 nt, Homo sapiens
cgccgucccgggagccccacuca

SEQ ID NO: 1534 - RNA, 21 nt, Homo sapiens
agcggugcuccugcgggccga

SEQ ID NO: 1535 - RNA, 21 nt, Homo sapiens
ucggcccgcaggagcaccgcu

SEQ ID NO: 1536 - RNA, 23 nt, Homo sapiens
ccggucccaggagaaccugcaga

SEQ ID NO: 1537 - RNA, 23 nt, Homo sapiens
ucugcagguucuccugggaccgg

SEQ ID NO: 1538 - RNA, 22 nt, Homo sapiens
aaggcccgggcuuuccucccag

SEQ ID NO: 1539 - RNA, 22 nt, Homo sapiens
cugggaggaaagcccgggccuu

SEQ ID NO: 1540 - RNA, 22 nt, Homo sapiens
agggaaggaggcuuggucuuag

SEQ ID NO: 1541 - RNA, 22 nt, Homo sapiens
cuaagaccaagccuccuucccu

SEQ ID NO: 1542 - RNA, 21 nt, Homo sapiens
gagguuuggggaggauuugcu

SEQ ID NO: 1543 - RNA, 21 nt, Homo sapiens
agcaaauccuccccaaaccuc

SEQ ID NO: 1544 - RNA, 20 nt, Homo sapiens
cgccccuccugcccccacag

SEQ ID NO: 1545 - RNA, 20 nt, Homo sapiens
cugugggggcaggaggggcg

SEQ ID NO: 1546 - RNA, 22 nt, Homo sapiens
ugcggggacaggccagggcauc

SEQ ID NO: 1547 - RNA, 22 nt, Homo sapiens
gaugcccuggccuguccccgca

SEQ ID NO: 1548 - RNA, 22 nt, Homo sapiens
ccugacccacccccucccgcag

SEQ ID NO: 1549 - RNA, 22 nt, Homo sapiens
cugcgggagggggugggucagg

SEQ ID NO: 1550 - RNA, 22 nt, Homo sapiens
cucgggcggaggugguugagug

SEQ ID NO: 1551 - RNA, 22 nt, Homo sapiens
cacucaaccaccuccgcccgag

SEQ ID NO: 1552 - RNA, 24 nt, Homo sapiens
agaggacccguagcugcuagaagg

SEQ ID NO: 1553 - RNA, 24 nt, Homo sapiens
ccuucuagcagcuacggguccucu

SEQ ID NO: 1554 - RNA, 22 nt, Homo sapiens
uuguggaucucaaggaugugcu

SEQ ID NO: 1555 - RNA, 22 nt, Homo sapiens
agcacauccuugagauccacaa

SEQ ID NO: 1556 - RNA, 22 nt, Homo sapiens
uucucuuucuuuagccuugugu

SEQ ID NO: 1557 - RNA, 22 nt, Homo sapiens
acacaaggcuaaagaaagagaa

SEQ ID NO: 1558 - RNA, 22 nt, Homo sapiens
caaggccaaaggaagagaacag

SEQ ID NO: 1559 - RNA, 22 nt, Homo sapiens
cuguucucuuccuuuggccuug

SEQ ID NO: 1560 - RNA, 23 nt, Homo sapiens
augcggaccuggguuagcggagu

SEQ ID NO: 1561 - RNA, 23 nt, Homo sapiens
acuccgcuaacccagguccgcau

SEQ ID NO: 1562 - RNA, 22 nt, Homo sapiens
agccaggcucugaagggaaagu

SEQ ID NO: 1563 - RNA, 22 nt, Homo sapiens
acuuucccuucagagccuggcu

SEQ ID NO: 1564 - RNA, 22 nt, Homo sapiens
uuucccuucagagccuggcuuu

SEQ ID NO: 1565 - RNA, 22 nt, Homo sapiens
aaagccaggcucugaagggaaa

SEQ ID NO: 1566 - RNA, 22 nt, Homo sapiens
ccagagaugguugccuuccuau

SEQ ID NO: 1567 - RNA, 22 nt, Homo sapiens
auaggaaggcaaccaucucugg

SEQ ID NO: 1568 - RNA, 23 nt, Homo sapiens
cagggaggcgcucacucucugcu

SEQ ID NO: 1569 - RNA, 23 nt, Homo sapiens
agcagagagugagcgccucccug

SEQ ID NO: 1570 - RNA, 22 nt, Homo sapiens
caugacgucacagaggcuucgc

SEQ ID NO: 1571 - RNA, 22 nt, Homo sapiens
gcgaagccucugugacgucaug

SEQ ID NO: 1572 - RNA, 23 nt, Homo sapiens
aggccucugugacgucacggugu

SEQ ID NO: 1573 - RNA, 23 nt, Homo sapiens
acaccgugacgucacagaggccu

SEQ ID NO: 1574 - RNA, 23 nt, Homo sapiens
ugccccaccugcugaccacccuc

SEQ ID NO: 1575 - RNA, 23 nt, Homo sapiens
gaggguggucagcagguggggca

SEQ ID NO: 1576 - RNA, 23 nt, Homo sapiens
gugagugggagccgguggggcug

SEQ ID NO: 1577 - RNA, 23 nt, Homo sapiens
cagccccaccggcucccacucac

SEQ ID NO: 1578 - RNA, 21 nt, Homo sapiens
uaggacuagauguuggaauua

SEQ ID NO: 1579 - RNA, 21 nt, Homo sapiens
uaauuccaacaucuaguccua

SEQ ID NO: 1580 - RNA, 22 nt, Homo sapiens
aaauucauguucaaucuaaacc

SEQ ID NO: 1581 - RNA, 22 nt, Homo sapiens
gguuuagauugaacaugaauuu

SEQ ID NO: 1582 - RNA, 22 nt, Homo sapiens
uuuagauugaacaugaaguuag

SEQ ID NO: 1583 - RNA, 22 nt, Homo sapiens
cuaacuucauguucaaucuaaa

SEQ ID NO: 1584 - RNA, 21 nt, Homo sapiens
gagggcaugcgcacuuugucc

SEQ ID NO: 1585 - RNA, 21 nt, Homo sapiens
ggacaaagugcgcaugcccuc

SEQ ID NO: 1586 - RNA, 21 nt, Homo sapiens
acaaggugugcaugccugacc

SEQ ID NO: 1587 - RNA, 21 nt, Homo sapiens
ggucaggcaugcacaccuugu

SEQ ID NO: 1588 - RNA, 22 nt, Homo sapiens
cuucugaucaagauuuguggug

SEQ ID NO: 1589 - RNA, 22 nt, Homo sapiens
caccacaaaucuugaucagaag

SEQ ID NO: 1590 - RNA, 21 nt, Homo sapiens
ccaaaucuugaucagaagccu

SEQ ID NO: 1591 - RNA, 21 nt, Homo sapiens
aggcuucugaucaagauuugg

SEQ ID NO: 1592 - RNA, 24 nt, Homo sapiens
aggcaggggcuggugcugggcggg

SEQ ID NO: 1593 - RNA, 24 nt, Homo sapiens
cccgcccagcaccagccccugccu

SEQ ID NO: 1594 - RNA, 21 nt, Homo sapiens
cgccugcccagcccuccugcu

SEQ ID NO: 1595 - RNA, 21 nt, Homo sapiens
agcaggagggcugggcaggcg

SEQ ID NO: 1596 - RNA, 22 nt, Homo sapiens
uuaacuccuuucacacccaugg

SEQ ID NO: 1597 - RNA, 22 nt, Homo sapiens
ccaugggugugaaaggaguuaa

SEQ ID NO: 1598 - RNA, 21 nt, Homo sapiens
uggauguggaaggaguuaucu

SEQ ID NO: 1599 - RNA, 21 nt, Homo sapiens
agauaacuccuuccacaucca

SEQ ID NO: 1600 - RNA, 22 nt, Homo sapiens
ugagugauugauagcuauguuc

SEQ ID NO: 1601 - RNA, 22 nt, Homo sapiens
gaacauagcuaucaaucacuca

SEQ ID NO: 1602 - RNA, 21 nt, Homo sapiens
auagcaauugcucuuuuggaa

SEQ ID NO: 1603 - RNA, 21 nt, Homo sapiens
uuccaaaagagcaauugcuau

SEQ ID NO: 1604 - RNA, 21 nt, Homo sapiens
ucugaaagagcaguugguguu

SEQ ID NO: 1605 - RNA, 21 nt, Homo sapiens
aacaccaacugcucuuucaga

SEQ ID NO: 1606 - RNA, 23 nt, Homo sapiens
cgcgggcgcuccuggccgccgcc

SEQ ID NO: 1607 - RNA, 23 nt, Homo sapiens
ggcggcggccaggagcgcccgcg

SEQ ID NO: 1608 - RNA, 20 nt, Homo sapiens
ccaggagauccagagagaau

SEQ ID NO: 1609 - RNA, 20 nt, Homo sapiens
auucucucuggaucuccugg

SEQ ID NO: 1610 - RNA, 22 nt, Homo sapiens
auucucucuggaucccauggau

SEQ ID NO: 1611 - RNA, 22 nt, Homo sapiens
auccaugggauccagagagaau

SEQ ID NO: 1612 - RNA, 22 nt, Homo sapiens
ucugccauccucccuccccuac

SEQ ID NO: 1613 - RNA, 22 nt, Homo sapiens
guaggggagggaggauggcaga

SEQ ID NO: 1614 - RNA, 24 nt, Homo sapiens
ggugggauggagagaagguaugag

SEQ ID NO: 1615 - RNA, 24 nt, Homo sapiens
cucauaccuucucuccaucccacc

SEQ ID NO: 1616 - RNA, 18 nt, Homo sapiens
ugagaugacacuguagcu

SEQ ID NO: 1617 - RNA, 18 nt, Homo sapiens
agcuacagugucaucuca

SEQ ID NO: 1618 - RNA, 21 nt, Homo sapiens
agcagacuugaccuacaauua

SEQ ID NO: 1619 - RNA, 21 nt, Homo sapiens
uaauuguaggucaagucugcu

SEQ ID NO: 1620 - RNA, 22 nt, Homo sapiens
cagaacaggagcauagaaaggc

SEQ ID NO: 1621 - RNA, 22 nt, Homo sapiens
gccuuucuaugcuccuguucug

SEQ ID NO: 1622 - RNA, 22 nt, Homo sapiens
uuaauuuuuuguuucggucacu

SEQ ID NO: 1623 - RNA, 22 nt, Homo sapiens
agugaccgaaacaaaaaauuaa

SEQ ID NO: 1624 - RNA, 23 nt, Homo sapiens
cuugccauccugguccacugcau

SEQ ID NO: 1625 - RNA, 23 nt, Homo sapiens
augcaguggaccaggauggcaag

SEQ ID NO: 1626 - RNA, 22 nt, Homo sapiens
guggaccaggauggcaagggcu

SEQ ID NO: 1627 - RNA, 22 nt, Homo sapiens
agcccuugccauccugguccac

SEQ ID NO: 1628 - RNA, 22 nt, Homo sapiens
auaccucaucuagaaugcugua

SEQ ID NO: 1629 - RNA, 22 nt, Homo sapiens
uacagcauucuagaugagguau

SEQ ID NO: 1630 - RNA, 22 nt, Homo sapiens
uucuagaugagagauauauaua

SEQ ID NO: 1631 - RNA, 22 nt, Homo sapiens
uauauauaucucucaucuagaa

SEQ ID NO: 1632 - RNA, 22 nt, Homo sapiens
ucuucuuccuuugcagaguuga

SEQ ID NO: 1633 - RNA, 22 nt, Homo sapiens
ucaacucugcaaaggaagaaga

SEQ ID NO: 1634 - RNA, 22 nt, Homo sapiens
aauucuguaaaggaagaagagg

SEQ ID NO: 1635 - RNA, 22 nt, Homo sapiens
ccucuucuuccuuuacagaauu

SEQ ID NO: 1636 - RNA, 22 nt, Homo sapiens
uaggagggaauaguaaaagcag

SEQ ID NO: 1637 - RNA, 22 nt, Homo sapiens
cugcuuuuacuauucccuccua

SEQ ID NO: 1638 - RNA, 22 nt, Homo sapiens
acccuugagccugaucccuagc

SEQ ID NO: 1639 - RNA, 22 nt, Homo sapiens
gcuagggaucaggcucaagggu

SEQ ID NO: 1640 - RNA, 22 nt, Homo sapiens
aauguuggaauccucgcuagag

SEQ ID NO: 1641 - RNA, 22 nt, Homo sapiens
cucuagcgaggauuccaacauu

SEQ ID NO: 1642 - RNA, 21 nt, Homo sapiens
uagcggggauuccaauauugg

SEQ ID NO: 1643 - RNA, 21 nt, Homo sapiens
ccaauauuggaauccccgcua

SEQ ID NO: 1644 - RNA, 22 nt, Homo sapiens
ugauugucuucauaucuagaac

SEQ ID NO: 1645 - RNA, 22 nt, Homo sapiens
guucuagauaugaagacaauca

SEQ ID NO: 1646 - RNA, 22 nt, Homo sapiens
uucuggauaugaagacaaucaa

SEQ ID NO: 1647 - RNA, 22 nt, Homo sapiens
uugauugucuucauauccagaa

SEQ ID NO: 1648 - RNA, 23 nt, Homo sapiens
ccccgguguuggggcgcgucugc

SEQ ID NO: 1649 - RNA, 23 nt, Homo sapiens
gcagacgcgccccaacaccgggg

SEQ ID NO: 1650 - RNA, 21 nt, Homo sapiens
ggcgcgcccagcucccgggcu

SEQ ID NO: 1651 - RNA, 21 nt, Homo sapiens
agcccgggagcugggcgcgcc

SEQ ID NO: 1652 - RNA, 20 nt, Homo sapiens
ugaggagaugcugggacuga

SEQ ID NO: 1653 - RNA, 20 nt, Homo sapiens
ucagucccagcaucuccuca

SEQ ID NO: 1654 - RNA, 21 nt, Homo sapiens
agagucggcgacgccgccagc

SEQ ID NO: 1655 - RNA, 21 nt, Homo sapiens
gcuggcggcgucgccgacucu

SEQ ID NO: 1656 - RNA, 22 nt, Homo sapiens
ugaagccagcucuggucugggc

SEQ ID NO: 1657 - RNA, 22 nt, Homo sapiens
gcccagaccagagcuggcuuca

SEQ ID NO: 1658 - RNA, 22 nt, Homo sapiens
ugagaccaggacuggaugcacc

SEQ ID NO: 1659 - RNA, 22 nt, Homo sapiens
ggugcauccaguccuggucuca

SEQ ID NO: 1660 - RNA, 24 nt, Homo sapiens
gaugcgccgcccacugccccgcgc

SEQ ID NO: 1661 - RNA, 24 nt, Homo sapiens
gcgcggggcagugggcggcgcauc

SEQ ID NO: 1662 - RNA, 22 nt, Homo sapiens
gcggggguggcggcggcauccc

SEQ ID NO: 1663 - RNA, 22 nt, Homo sapiens
gggaugccgccgccacccccgc

SEQ ID NO: 1664 - RNA, 22 nt, Homo sapiens
uuacggaccagcuaagggaggc

SEQ ID NO: 1665 - RNA, 22 nt, Homo sapiens
gccucccuuagcugguccguaa

SEQ ID NO: 1666 - RNA, 21 nt, Homo sapiens
cacacauagcagguguauaua

SEQ ID NO: 1667 - RNA, 21 nt, Homo sapiens
uauauacaccugcuaugugug

SEQ ID NO: 1668 - RNA, 22 nt, Homo sapiens
guauacaccugauauguguaug

SEQ ID NO: 1669 - RNA, 22 nt, Homo sapiens
cauacacauaucagguguauac

SEQ ID NO: 1670 - RNA, 22 nt, Homo sapiens
ugaaugguaaagcgaugucaca

SEQ ID NO: 1671 - RNA, 22 nt, Homo sapiens
ugugacaucgcuuuaccauuca

SEQ ID NO: 1672 - RNA, 20 nt, Homo sapiens
aucgcuuuaccauucauguu

SEQ ID NO: 1673 - RNA, 20 nt, Homo sapiens
aacaugaaugguaaagcgau

SEQ ID NO: 1674 - RNA, 18 nt, Homo sapiens
uggauaugaugacugaaa

SEQ ID NO: 1675 - RNA, 18 nt, Homo sapiens
uuucagucaucauaucca

SEQ ID NO: 1676 - RNA, 18 nt, Homo sapiens
cggugagcgcucgcuggc

SEQ ID NO: 1677 - RNA, 18 nt, Homo sapiens
gccagcgagcgcucaccg

SEQ ID NO: 1678 - RNA, 23 nt, Homo sapiens
ucugcacugugaguuggcuggcu

SEQ ID NO: 1679 - RNA, 23 nt, Homo sapiens
agccagccaacucacagugcaga

SEQ ID NO: 1680 - RNA, 24 nt, Homo sapiens
acauccugcuccacagggcagagg

SEQ ID NO: 1681 - RNA, 24 nt, Homo sapiens
ccucugcccuguggagcaggaugu

SEQ ID NO: 1682 - RNA, 22 nt, Homo sapiens
ucuggcuaucucacgagacugu

SEQ ID NO: 1683 - RNA, 22 nt, Homo sapiens
acagucucgugagauagccaga

SEQ ID NO: 1684 - RNA, 22 nt, Homo sapiens
auauuauuagccacuucuggau

SEQ ID NO: 1685 - RNA, 22 nt, Homo sapiens
auccagaaguggcuaauaauau

SEQ ID NO: 1686 - RNA, 21 nt, Homo sapiens
agaaguggcuaauaauauuga

SEQ ID NO: 1687 - RNA, 21 nt, Homo sapiens
ucaauauuauuagccacuucu

SEQ ID NO: 1688 - RNA, 22 nt, Homo sapiens
uaaaguggcagaguauagacac

SEQ ID NO: 1689 - RNA, 22 nt, Homo sapiens
gugucuauacucugccacuuua

SEQ ID NO: 1690 - RNA, 22 nt, Homo sapiens
ugucuauacucugucacuuuac

SEQ ID NO: 1691 - RNA, 22 nt, Homo sapiens
guaaagugacagaguauagaca

SEQ ID NO: 1692 - RNA, 21 nt, Homo sapiens
ucucaguaaguggcacucugu

SEQ ID NO: 1693 - RNA, 21 nt, Homo sapiens
acagagugccacuuacugaga

SEQ ID NO: 1694 - RNA, 21 nt, Homo sapiens
gacagagugccacuuacugaa

SEQ ID NO: 1695 - RNA, 21 nt, Homo sapiens
uucaguaaguggcacucuguc

SEQ ID NO: 1696 - RNA, 22 nt, Homo sapiens
aacucacgaaguauaccgaagu

SEQ ID NO: 1697 - RNA, 22 nt, Homo sapiens
acuucgguauacuucgugaguu

SEQ ID NO: 1698 - RNA, 22 nt, Homo sapiens
uucgguauacuuugugaauugg

SEQ ID NO: 1699 - RNA, 22 nt, Homo sapiens
ccaauucacaaaguauaccgaa

SEQ ID NO: 1700 - RNA, 22 nt, Homo sapiens
acuggcaugcugcauuuauaua

SEQ ID NO: 1701 - RNA, 22 nt, Homo sapiens
uauauaaaugcagcaugccagu

SEQ ID NO: 1702 - RNA, 22 nt, Homo sapiens
aucuaaaugcagcaugccaguc

SEQ ID NO: 1703 - RNA, 22 nt, Homo sapiens
gacuggcaugcugcauuuagau

SEQ ID NO: 1704 - RNA, 19 nt, Homo sapiens
cauccguccgucuguccac

SEQ ID NO: 1705 - RNA, 19 nt, Homo sapiens
guggacagacggacggaug

SEQ ID NO: 1706 - RNA, 21 nt, Homo sapiens
aguggaccgaggaaggaagga

SEQ ID NO: 1707 - RNA, 21 nt, Homo sapiens
uccuuccuuccucgguccacu

SEQ ID NO: 1708 - RNA, 22 nt, Homo sapiens
uacacaagaaaaccaaggcuca

SEQ ID NO: 1709 - RNA, 22 nt, Homo sapiens
ugagccuugguuuucuugugua

SEQ ID NO: 1710 - RNA, 21 nt, Homo sapiens
uaacauaauaguguggauuga

SEQ ID NO: 1711 - RNA, 21 nt, Homo sapiens
ucaauccacacuauuauguua

SEQ ID NO: 1712 - RNA, 21 nt, Homo sapiens
ugcuuaaccuugcccucgaaa

SEQ ID NO: 1713 - RNA, 21 nt, Homo sapiens
uuucgagggcaagguuaagca

SEQ ID NO: 1714 - RNA, 21 nt, Homo sapiens
uuggacgguaagguuaagcaa

SEQ ID NO: 1715 - RNA, 21 nt, Homo sapiens
uugcuuaaccuuaccguccaa

SEQ ID NO: 1716 - RNA, 21 nt, Homo sapiens
aaaagcaucaggaaguaccca

SEQ ID NO: 1717 - RNA, 21 nt, Homo sapiens
uggguacuuccugaugcuuuu

SEQ ID NO: 1718 - RNA, 21 nt, Homo sapiens
gcaggacaggcagaaguggau

SEQ ID NO: 1719 - RNA, 21 nt, Homo sapiens
auccacuucugccuguccugc

SEQ ID NO: 1720 - RNA, 22 nt, Homo sapiens
cagggcuggcagugacaugggu

SEQ ID NO: 1721 - RNA, 22 nt, Homo sapiens
acccaugucacugccagcccug

SEQ ID NO: 1722 - RNA, 22 nt, Homo sapiens
auuucccugccauucccuuggc

SEQ ID NO: 1723 - RNA, 22 nt, Homo sapiens
gccaagggaauggcagggaaau

SEQ ID NO: 1724 - RNA, 22 nt, Homo sapiens
uggcggcgguaguuaugggcuu

SEQ ID NO: 1725 - RNA, 22 nt, Homo sapiens
aagcccauaacuaccgccgcca

SEQ ID NO: 1726 - RNA, 22 nt, Homo sapiens
gcucccucuagggucgcucgga

SEQ ID NO: 1727 - RNA, 22 nt, Homo sapiens
uccgagcgacccuagagggagc

SEQ ID NO: 1728 - RNA, 22 nt, Homo sapiens
ugggaacuuaguagagguuuaa

SEQ ID NO: 1729 - RNA, 22 nt, Homo sapiens
uuaaaccucuacuaaguuccca

SEQ ID NO: 1730 - RNA, 21 nt, Homo sapiens
uggggcuagugaugcaggacg

SEQ ID NO: 1731 - RNA, 21 nt, Homo sapiens
cguccugcaucacuagcccca

SEQ ID NO: 1732 - RNA, 22 nt, Homo sapiens
gcugacagcagggcuggccgcu

SEQ ID NO: 1733 - RNA, 22 nt, Homo sapiens
agcggccagcccugcugucagc

SEQ ID NO: 1734 - RNA, 21 nt, Homo sapiens
auuggacugcugauggcccgu

SEQ ID NO: 1735 - RNA, 21 nt, Homo sapiens
acgggccaucagcaguccaau

SEQ ID NO: 1736 - RNA, 22 nt, Homo sapiens
aggccaucagcaguccaaugaa

SEQ ID NO: 1737 - RNA, 22 nt, Homo sapiens
uucauuggacugcugauggccu

SEQ ID NO: 1738 - RNA, 22 nt, Homo sapiens
uuggacagaaaacacgcaggaa

SEQ ID NO: 1739 - RNA, 22 nt, Homo sapiens
uuccugcguguuuucuguccaa

SEQ ID NO: 1740 - RNA, 20 nt, Homo sapiens
ccugcguguuuucuguccaa

SEQ ID NO: 1741 - RNA, 20 nt, Homo sapiens
uuggacagaaaacacgcagg

SEQ ID NO: 1742 - RNA, 22 nt, Homo sapiens
ugagacaggcuuaugcugcuau

SEQ ID NO: 1743 - RNA, 22 nt, Homo sapiens
auagcagcauaagccugucuca

SEQ ID NO: 1744 - RNA, 22 nt, Homo sapiens
auagcagcaugaaccugucuca

SEQ ID NO: 1745 - RNA, 22 nt, Homo sapiens
ugagacagguucaugcugcuau

SEQ ID NO: 1746 - RNA, 20 nt, Homo sapiens
gagacagguucaugcugcua

SEQ ID NO: 1747 - RNA, 20 nt, Homo sapiens
uagcagcaugaaccugucuc

SEQ ID NO: 1748 - RNA, 21 nt, Homo sapiens
auagcagcauaagccugucuc

SEQ ID NO: 1749 - RNA, 21 nt, Homo sapiens
gagacaggcuuaugcugcuau

SEQ ID NO: 1750 - RNA, 22 nt, Homo sapiens
uguguggauccuggaggaggca

SEQ ID NO: 1751 - RNA, 22 nt, Homo sapiens
ugccuccuccaggauccacaca

SEQ ID NO: 1752 - RNA, 22 nt, Homo sapiens
agacaucaagaucagucccaaa

SEQ ID NO: 1753 - RNA, 22 nt, Homo sapiens
uuugggacugaucuugaugucu

SEQ ID NO: 1754 - RNA, 22 nt, Homo sapiens
uuugggacugaucuugaugucu

SEQ ID NO: 1755 - RNA, 22 nt, Homo sapiens
agacaucaagaucagucccaaa

SEQ ID NO: 1756 - RNA, 22 nt, Homo sapiens
aaggaaccagaaaaugagaagu

SEQ ID NO: 1757 - RNA, 22 nt, Homo sapiens
acuucucauuuucugguuccuu

SEQ ID NO: 1758 - RNA, 22 nt, Homo sapiens
ucuggccuugacuugacucuuu

SEQ ID NO: 1759 - RNA, 22 nt, Homo sapiens
aaagagucaagucaaggccaga

SEQ ID NO: 1760 - RNA, 23 nt, Homo sapiens
ucaaggccagaggucccacagca

SEQ ID NO: 1761 - RNA, 23 nt, Homo sapiens
ugcugugggaccucuggccuuga

SEQ ID NO: 1762 - RNA, 21 nt, Homo sapiens
acuccaguuuuaguucucuug

SEQ ID NO: 1763 - RNA, 21 nt, Homo sapiens
caagagaacuaaaacuggagu

SEQ ID NO: 1764 - RNA, 22 nt, Homo sapiens
aagagaacugaaaguggagccu

SEQ ID NO: 1765 - RNA, 22 nt, Homo sapiens
aggcuccacuuucaguucucuu

SEQ ID NO: 1766 - RNA, 22 nt, Homo sapiens
uaagggguguauggcagaugca

SEQ ID NO: 1767 - RNA, 22 nt, Homo sapiens
ugcaucugccauacaccccuua

SEQ ID NO: 1768 - RNA, 21 nt, Homo sapiens
uuucagauaacaguauuacau

SEQ ID NO: 1769 - RNA, 21 nt, Homo sapiens
auguaauacuguuaucugaaa

SEQ ID NO: 1770 - RNA, 22 nt, Homo sapiens
aagcaauacuguuaccugaaau

SEQ ID NO: 1771 - RNA, 22 nt, Homo sapiens
auuucagguaacaguauugcuu

SEQ ID NO: 1772 - RNA, 22 nt, Homo sapiens
uacuaacugcagauucaaguga

SEQ ID NO: 1773 - RNA, 22 nt, Homo sapiens
ucacuugaaucugcaguuagua

SEQ ID NO: 1774 - RNA, 21 nt, Homo sapiens
auugccuaacaugugccagaa

SEQ ID NO: 1775 - RNA, 21 nt, Homo sapiens
uucuggcacauguuaggcaau

SEQ ID NO: 1776 - RNA, 22 nt, Homo sapiens
ucugguauguaguagguaauaa

SEQ ID NO: 1777 - RNA, 22 nt, Homo sapiens
uuauuaccuacuacauaccaga

SEQ ID NO: 1778 - RNA, 22 nt, Homo sapiens
aguugccuuuuuguucccaugc

SEQ ID NO: 1779 - RNA, 22 nt, Homo sapiens
gcaugggaacaaaaaggcaacu

SEQ ID NO: 1780 - RNA, 21 nt, Homo sapiens
auaggcaccaaaaagcaacaa

SEQ ID NO: 1781 - RNA, 21 nt, Homo sapiens
uuguugcuuuuuggugccuau

SEQ ID NO: 1782 - RNA, 22 nt, Homo sapiens
ccugcaacuuugccugaucaga

SEQ ID NO: 1783 - RNA, 22 nt, Homo sapiens
ucugaucaggcaaaguugcagg

SEQ ID NO: 1784 - RNA, 22 nt, Homo sapiens
ugaucaggcaaaauugcagacu

SEQ ID NO: 1785 - RNA, 22 nt, Homo sapiens
agucugcaauuuugccugauca

SEQ ID NO: 1786 - RNA, 22 nt, Homo sapiens
uuguggcuggucaugaggcuaa

SEQ ID NO: 1787 - RNA, 22 nt, Homo sapiens
uuagccucaugaccagccacaa

SEQ ID NO: 1788 - RNA, 21 nt, Homo sapiens
uuagucucaugaucagacaca

SEQ ID NO: 1789 - RNA, 21 nt, Homo sapiens
ugugucugaucaugagacuaa

SEQ ID NO: 1790 - RNA, 22 nt, Homo sapiens
aaagauagacaauuggcuaaau

SEQ ID NO: 1791 - RNA, 22 nt, Homo sapiens
auuuagccaauugucuaucuuu

SEQ ID NO: 1792 - RNA, 22 nt, Homo sapiens
uuagccaauuguccaucuuuag

SEQ ID NO: 1793 - RNA, 22 nt, Homo sapiens
cuaaagauggacaauuggcuaa

SEQ ID NO: 1794 - RNA, 22 nt, Homo sapiens
ucugugagaccaaagaacuacu

SEQ ID NO: 1795 - RNA, 22 nt, Homo sapiens
aguaguucuuuggucucacaga

SEQ ID NO: 1796 - RNA, 22 nt, Homo sapiens
uuguucuuuggucuuucagcca

SEQ ID NO: 1797 - RNA, 22 nt, Homo sapiens
uggcugaaagaccaaagaacaa

SEQ ID NO: 1798 - RNA, 23 nt, Homo sapiens
cgggcuguccggaggggucggcu

SEQ ID NO: 1799 - RNA, 23 nt, Homo sapiens
agccgaccccuccggacagcccg

SEQ ID NO: 1800 - RNA, 23 nt, Homo sapiens
ucuguauucuccuuugccugcag

SEQ ID NO: 1801 - RNA, 23 nt, Homo sapiens
cugcaggcaaaggagaauacaga

SEQ ID NO: 1802 - RNA, 23 nt, Homo sapiens
uacauggauggaaaccuucaagc

SEQ ID NO: 1803 - RNA, 23 nt, Homo sapiens
gcuugaagguuuccauccaugua

SEQ ID NO: 1804 - RNA, 22 nt, Homo sapiens
uauggagguucuagaccauguu

SEQ ID NO: 1805 - RNA, 22 nt, Homo sapiens
aacauggucuagaaccuccaua

SEQ ID NO: 1806 - RNA, 22 nt, Homo sapiens
gggaccauccugccugcugugg

SEQ ID NO: 1807 - RNA, 22 nt, Homo sapiens
ccacagcaggcaggaugguccc

SEQ ID NO: 1808 - RNA, 22 nt, Homo sapiens
ucagcaggcaggcuggugcagc

SEQ ID NO: 1809 - RNA, 22 nt, Homo sapiens
gcugcaccagccugccugcuga

SEQ ID NO: 1810 - RNA, 22 nt, Homo sapiens
ucaccugaccucccaugccugu

SEQ ID NO: 1811 - RNA, 22 nt, Homo sapiens
acaggcaugggaggucagguga

SEQ ID NO: 1812 - RNA, 22 nt, Homo sapiens
caggcacgggagcucaggugag

SEQ ID NO: 1813 - RNA, 22 nt, Homo sapiens
cucaccugagcucccgugccug

SEQ ID NO: 1814 - RNA, 21 nt, Homo sapiens
ugaguguugucuacgagggca

SEQ ID NO: 1815 - RNA, 21 nt, Homo sapiens
ugcccucguagacaacacuca

SEQ ID NO: 1816 - RNA, 21 nt, Homo sapiens
acugacaggagagcauuuuga

SEQ ID NO: 1817 - RNA, 21 nt, Homo sapiens
ucaaaaugcucuccugucagu

SEQ ID NO: 1818 - RNA, 22 nt, Homo sapiens
ugaccugggacucggacagcug

SEQ ID NO: 1819 - RNA, 22 nt, Homo sapiens
cagcuguccgagucccagguca

SEQ ID NO: 1820 - RNA, 22 nt, Homo sapiens
ucucaggaguaaagacagaguu

SEQ ID NO: 1821 - RNA, 22 nt, Homo sapiens
aacucugucuuuacuccugaga

SEQ ID NO: 1822 - RNA, 22 nt, Homo sapiens
aacucugucuucacucaugagu

SEQ ID NO: 1823 - RNA, 22 nt, Homo sapiens
acucaugagugaagacagaguu

SEQ ID NO: 1824 - RNA, 22 nt, Homo sapiens
uggggcggagcuuccggaggcc

SEQ ID NO: 1825 - RNA, 22 nt, Homo sapiens
ggccuccggaagcuccgcccca

SEQ ID NO: 1826 - RNA, 22 nt, Homo sapiens
caaucagcaaguauacugcccu

SEQ ID NO: 1827 - RNA, 22 nt, Homo sapiens
agggcaguauacuugcugauug

SEQ ID NO: 1828 - RNA, 22 nt, Homo sapiens
uggcagugucuuagcugguugu

SEQ ID NO: 1829 - RNA, 22 nt, Homo sapiens
acaaccagcuaagacacugcca

SEQ ID NO: 1830 - RNA, 22 nt, Homo sapiens
ccaauauuggcugugcugcucc

SEQ ID NO: 1831 - RNA, 22 nt, Homo sapiens
ggagcagcacagccaauauugg

SEQ ID NO: 1832 - RNA, 21 nt, Homo sapiens
uagcagcacagaaauauuggc

SEQ ID NO: 1833 - RNA, 21 nt, Homo sapiens
gccaauauuucugugcugcua

SEQ ID NO: 1834 - RNA, 21 nt, Homo sapiens
uaauuuuauguauaagcuagu

SEQ ID NO: 1835 - RNA, 21 nt, Homo sapiens
acuagcuuauacauaaaauua

SEQ ID NO: 1836 - RNA, 22 nt, Homo sapiens
gagcuuauucauaaaagugcag

SEQ ID NO: 1837 - RNA, 22 nt, Homo sapiens
cugcacuuuuaugaauaagcuc

SEQ ID NO: 1838 - RNA, 22 nt, Homo sapiens
aagacgggaggaaagaagggag

SEQ ID NO: 1839 - RNA, 22 nt, Homo sapiens
cucccuucuuuccucccgucuu

SEQ ID NO: 1840 - RNA, 22 nt, Homo sapiens
cagugguuuuacccuaugguag

SEQ ID NO: 1841 - RNA, 22 nt, Homo sapiens
cuaccauaggguaaaaccacug

SEQ ID NO: 1842 - RNA, 22 nt, Homo sapiens
auucuaauuucuccacgucuuu

SEQ ID NO: 1843 - RNA, 22 nt, Homo sapiens
aaagacguggagaaauuagaau

SEQ ID NO: 1844 - RNA, 22 nt, Homo sapiens
aaccagcaccccaacuuuggac

SEQ ID NO: 1845 - RNA, 22 nt, Homo sapiens
guccaaaguuggggugcugguu

SEQ ID NO: 1846 - RNA, 24 nt, Homo sapiens
aaagacauaggauagagucaccuc

SEQ ID NO: 1847 - RNA, 24 nt, Homo sapiens
gaggugacucuauccuaugucuuu

SEQ ID NO: 1848 - RNA, 22 nt, Homo sapiens
uaacugguugaacaacugaacc

SEQ ID NO: 1849 - RNA, 22 nt, Homo sapiens
gguucaguuguucaaccaguua

SEQ ID NO: 1850 - RNA, 20 nt, Homo sapiens
cgugccacccuuuuccccag

SEQ ID NO: 1851 - RNA, 20 nt, Homo sapiens
cuggggaaaaggguggcacg

SEQ ID NO: 1852 - RNA, 17 nt, Homo sapiens
guggggccaggcggugg

SEQ ID NO: 1853 - RNA, 17 nt, Homo sapiens
ccaccgccuggccccac

SEQ ID NO: 1854 - RNA, 22 nt, Homo sapiens
aaaagcuggguugagagggcaa

SEQ ID NO: 1855 - RNA, 22 nt, Homo sapiens
uugcccucucaacccagcuuuu

SEQ ID NO: 1856 - RNA, 22 nt, Homo sapiens
gguccagaggggagauagguuc

SEQ ID NO: 1857 - RNA, 22 nt, Homo sapiens
gaaccuaucuccccucuggacc

SEQ ID NO: 1858 - RNA, 23 nt, Homo sapiens
uagccuucagaucuugguguuuu

SEQ ID NO: 1859 - RNA, 23 nt, Homo sapiens
aaaacaccaagaucugaaggcua

SEQ ID NO: 1860 - RNA, 23 nt, Homo sapiens
ccacuuggaucugaaggcugccc

SEQ ID NO: 1861 - RNA, 23 nt, Homo sapiens
gggcagccuucagauccaagugg

SEQ ID NO: 1862 - RNA, 22 nt, Homo sapiens
ugugcgcagggagaccucuccc

SEQ ID NO: 1863 - RNA, 22 nt, Homo sapiens
gggagaggucucccugcgcaca

SEQ ID NO: 1864 - RNA, 22 nt, Homo sapiens
ugucuacuacuggagacacugg

SEQ ID NO: 1865 - RNA, 22 nt, Homo sapiens
ccagugucuccaguaguagaca

SEQ ID NO: 1866 - RNA, 21 nt, Homo sapiens
aaggcagggcccccgcucccc

SEQ ID NO: 1867 - RNA, 21 nt, Homo sapiens
ggggagcgggggcccugccuu

SEQ ID NO: 1868 - RNA, 21 nt, Homo sapiens
cugacuguugccguccuccag

SEQ ID NO: 1869 - RNA, 21 nt, Homo sapiens
cuggaggacggcaacagucag

SEQ ID NO: 1870 - RNA, 25 nt, Homo sapiens
aaaaaccacaauuacuuuugcacca

SEQ ID NO: 1871 - RNA, 25 nt, Homo sapiens
uggugcaaaaguaauugugguuuuu

SEQ ID NO: 1872 - RNA, 23 nt, Homo sapiens
caaaaaccgcaauuacuuuugca

SEQ ID NO: 1873 - RNA, 23 nt, Homo sapiens
ugcaaaaguaauugcgguuuuug

SEQ ID NO: 1874 - RNA, 22 nt, Homo sapiens
augugccugagggaguaagaca

SEQ ID NO: 1875 - RNA, 22 nt, Homo sapiens
ugucuuacucccucaggcacau

SEQ ID NO: 1876 - RNA, 20 nt, Homo sapiens
ucuuacucccucaggcacug

SEQ ID NO: 1877 - RNA, 20 nt, Homo sapiens
cagugccugagggaguaaga

SEQ ID NO: 1878 - RNA, 22 nt, Homo sapiens
agacacauuuggagagggaccc

SEQ ID NO: 1879 - RNA, 22 nt, Homo sapiens
gggucccucuccaaaugugucu

SEQ ID NO: 1880 - RNA, 22 nt, Homo sapiens
gguucccucuccaaaugugucu

SEQ ID NO: 1881 - RNA, 22 nt, Homo sapiens
agacacauuuggagagggaacc

SEQ ID NO: 1882 - RNA, 21 nt, Homo sapiens
aaaauuucuuucacuacuuag

SEQ ID NO: 1883 - RNA, 21 nt, Homo sapiens
cuaaguagugaaagaaauuuu

SEQ ID NO: 1884 - RNA, 21 nt, Homo sapiens
uuagugaaggcuauuuuaauu

SEQ ID NO: 1885 - RNA, 21 nt, Homo sapiens
aauuaaaauagccuucacuaa

SEQ ID NO: 1886 - RNA, 20 nt, Homo sapiens
acuguaaacgcuuucugaug

SEQ ID NO: 1887 - RNA, 20 nt, Homo sapiens
caucagaaagcguuuacagu

SEQ ID NO: 1888 - RNA, 22 nt, Homo sapiens
gcaugugaugaagcaaaucagu

SEQ ID NO: 1889 - RNA, 22 nt, Homo sapiens
acugauuugcuucaucacaugc

SEQ ID NO: 1890 - RNA, 24 nt, Homo sapiens
caaagugaugaguaauacuggcug

SEQ ID NO: 1891 - RNA, 24 nt, Homo sapiens
cagccaguauuacucaucacuuug

SEQ ID NO: 1892 - RNA, 20 nt, Homo sapiens
gaaucggaaaggaggcgccg

SEQ ID NO: 1893 - RNA, 20 nt, Homo sapiens
cggcgccuccuuuccgauuc

SEQ ID NO: 1894 - RNA, 21 nt, Homo sapiens
uugugaagaaagaaauucuua

SEQ ID NO: 1895 - RNA, 21 nt, Homo sapiens
uaagaauuucuuucuucacaa

SEQ ID NO: 1896 - RNA, 22 nt, Homo sapiens
aggaggcaucuugagaaaugga

SEQ ID NO: 1897 - RNA, 22 nt, Homo sapiens
uccauuucucaagaugccuccu

SEQ ID NO: 1898 - RNA, 24 nt, Homo sapiens
acaaaaaaaaaagcccaacccuuc

SEQ ID NO: 1899 - RNA, 24 nt, Homo sapiens
gaaggguugggcuuuuuuuuuugu

SEQ ID NO: 1900 - RNA, 22 nt, Homo sapiens
uguuguacuuuuuuuuuuguuc

SEQ ID NO: 1901 - RNA, 22 nt, Homo sapiens
gaacaaaaaaaaaaguacaaca

SEQ ID NO: 1902 - RNA, 21 nt, Homo sapiens
ucucucggcuccucgcggcuc

SEQ ID NO: 1903 - RNA, 21 nt, Homo sapiens
gagccgcgaggagccgagaga

SEQ ID NO: 1904 - RNA, 23 nt, Homo sapiens
cgagggcauuucaugaugcaggc

SEQ ID NO: 1905 - RNA, 23 nt, Homo sapiens
gccugcaucaugaaaugcccucg

SEQ ID NO: 1906 - RNA, 22 nt, Homo sapiens
augaagugcacucaugauaugu

SEQ ID NO: 1907 - RNA, 22 nt, Homo sapiens
acauaucaugagugcacuucau

SEQ ID NO: 1908 - RNA, 22 nt, Homo sapiens
ugucuacauuaaugaaaagagc

SEQ ID NO: 1909 - RNA, 22 nt, Homo sapiens
gcucuuuucauuaauguagaca

SEQ ID NO: 1910 - RNA, 22 nt, Homo sapiens
ucacccugcaucccgcacccag

SEQ ID NO: 1911 - RNA, 22 nt, Homo sapiens
cugggugcgggaugcaggguga

SEQ ID NO: 1912 - RNA, 22 nt, Homo sapiens
gugggcugggcugggcugggcc

SEQ ID NO: 1913 - RNA, 22 nt, Homo sapiens
ggcccagcccagcccagcccac

SEQ ID NO: 1914 - RNA, 20 nt, Homo sapiens
cgcgggucggggucugcagg

SEQ ID NO: 1915 - RNA, 20 nt, Homo sapiens
ccugcagaccccgacccgcg

SEQ ID NO: 1916 - RNA, 21 nt, Homo sapiens
ucaccugagcucccgugccug

SEQ ID NO: 1917 - RNA, 21 nt, Homo sapiens
caggcacgggagcucagguga

SEQ ID NO: 1918 - RNA, 20 nt, Homo sapiens
aggcaugggaggucagguga

SEQ ID NO: 1919 - RNA, 20 nt, Homo sapiens
ucaccugaccucccaugccu

SEQ ID NO: 1920 - RNA, 23 nt, Homo sapiens
caucagcacccuauguccuuucu

SEQ ID NO: 1921 - RNA, 23 nt, Homo sapiens
agaaaggacauagggugcugaug

SEQ ID NO: 1922 - RNA, 22 nt, Homo sapiens
aaagacauaguugcaagauggg

SEQ ID NO: 1923 - RNA, 22 nt, Homo sapiens
cccaucuugcaacuaugucuuu

SEQ ID NO: 1924 - RNA, 22 nt, Homo sapiens
uuugugaccugguccacuaacc

SEQ ID NO: 1925 - RNA, 22 nt, Homo sapiens
gguuaguggaccaggucacaaa

SEQ ID NO: 1926 - RNA, 22 nt, Homo sapiens
gaugguugaccagagagcacac

SEQ ID NO: 1927 - RNA, 22 nt, Homo sapiens
gugugcucucuggucaaccauc

SEQ ID NO: 1928 - RNA, 20 nt, Homo sapiens
aaaagcuggguugagagggu

SEQ ID NO: 1929 - RNA, 20 nt, Homo sapiens
acccucucaacccagcuuuu

SEQ ID NO: 1930 - RNA, 21 nt, Homo sapiens
cacaagguauugguauuaccu

SEQ ID NO: 1931 - RNA, 21 nt, Homo sapiens
agguaauaccaauaccuugug

SEQ ID NO: 1932 - RNA, 22 nt, Homo sapiens
uaguaccaguaccuuguguuca

SEQ ID NO: 1933 - RNA, 22 nt, Homo sapiens
ugaacacaagguacugguacua

SEQ ID NO: 1934 - RNA, 22 nt, Homo sapiens
aguauucuguaccagggaaggu

SEQ ID NO: 1935 - RNA, 22 nt, Homo sapiens
accuucccugguacagaauacu

SEQ ID NO: 1936 - RNA, 22 nt, Homo sapiens
uggcaguguauuguuagcuggu

SEQ ID NO: 1937 - RNA, 22 nt, Homo sapiens
accagcuaacaauacacugcca

SEQ ID NO: 1938 - RNA, 22 nt, Homo sapiens
uauacaagggcaagcucucugu

SEQ ID NO: 1939 - RNA, 22 nt, Homo sapiens
acagagagcuugcccuuguaua

SEQ ID NO: 1940 - RNA, 22 nt, Homo sapiens
agcgagguugcccuuuguauau

SEQ ID NO: 1941 - RNA, 22 nt, Homo sapiens
auauacaaagggcaaccucgcu

SEQ ID NO: 1942 - RNA, 22 nt, Homo sapiens
caaucacuaacuccacugccau

SEQ ID NO: 1943 - RNA, 22 nt, Homo sapiens
auggcaguggaguuagugauug

SEQ ID NO: 1944 - RNA, 23 nt, Homo sapiens
uaggcagugucauuagcugauug

SEQ ID NO: 1945 - RNA, 23 nt, Homo sapiens
caaucagcuaaugacacugccua

SEQ ID NO: 1946 - RNA, 22 nt, Homo sapiens
cagccacaacuacccugccacu

SEQ ID NO: 1947 - RNA, 22 nt, Homo sapiens
aguggcaggguaguuguggcug

SEQ ID NO: 1948 - RNA, 22 nt, Homo sapiens
aggcaguguauuguuagcuggc

SEQ ID NO: 1949 - RNA, 22 nt, Homo sapiens
gccagcuaacaauacacugccu

SEQ ID NO: 1950 - RNA, 22 nt, Homo sapiens
aaucacuaaccacacggccagg

SEQ ID NO: 1951 - RNA, 22 nt, Homo sapiens
ccuggccgugugguuagugauu

SEQ ID NO: 1952 - RNA, 23 nt, Homo sapiens
aggcaguguaguuagcugauugc

SEQ ID NO: 1953 - RNA, 23 nt, Homo sapiens
gcaaucagcuaacuacacugccu

SEQ ID NO: 1954 - RNA, 20 nt, Homo sapiens
guccgcucggcgguggccca

SEQ ID NO: 1955 - RNA, 20 nt, Homo sapiens
ugggccaccgccgagcggac

SEQ ID NO: 1956 - RNA, 23 nt, Homo sapiens
gaacgccuguucuugccaggugg

SEQ ID NO: 1957 - RNA, 23 nt, Homo sapiens
ccaccuggcaagaacaggcguuc

SEQ ID NO: 1958 - RNA, 19 nt, Homo sapiens
aagugugcagggcacuggu

SEQ ID NO: 1959 - RNA, 19 nt, Homo sapiens
accagugcccugcacacuu

SEQ ID NO: 1960 - RNA, 21 nt, Homo sapiens
aggggugcuaucugugauuga

SEQ ID NO: 1961 - RNA, 21 nt, Homo sapiens
ucaaucacagauagcaccccu

SEQ ID NO: 1962 - RNA, 22 nt, Homo sapiens
cuuucagucagauguuugcugc

SEQ ID NO: 1963 - RNA, 22 nt, Homo sapiens
gcagcaaacaucugacugaaag

SEQ ID NO: 1964 - RNA, 22 nt, Homo sapiens
uguaaacauccccgacuggaag

SEQ ID NO: 1965 - RNA, 22 nt, Homo sapiens
cuuccagucggggauguuuaca

SEQ ID NO: 1966 - RNA, 22 nt, Homo sapiens
uguaaacauccucgacuggaag

SEQ ID NO: 1967 - RNA, 22 nt, Homo sapiens
cuuccagucgaggauguuuaca

SEQ ID NO: 1968 - RNA, 22 nt, Homo sapiens
agaaguaauugcgguuuugcca

SEQ ID NO: 1969 - RNA, 22 nt, Homo sapiens
uggcaaaaccgcaauuacuucu

SEQ ID NO: 1970 - RNA, 22 nt, Homo sapiens
caaaacuggcaauuacuuuugc

SEQ ID NO: 1971 - RNA, 22 nt, Homo sapiens
gcaaaaguaauugccaguuuug

SEQ ID NO: 1972 - RNA, 22 nt, Homo sapiens
aaaaguaauugcgaguuuuacc

SEQ ID NO: 1973 - RNA, 22 nt, Homo sapiens
gguaaaacucgcaauuacuuuu

SEQ ID NO: 1974 - RNA, 22 nt, Homo sapiens
caagaaccucaguugcuuuugu

SEQ ID NO: 1975 - RNA, 22 nt, Homo sapiens
acaaaagcaacugagguucuug

SEQ ID NO: 1976 - RNA, 22 nt, Homo sapiens
caaaaaucucaauuacuuuugc

SEQ ID NO: 1977 - RNA, 22 nt, Homo sapiens
gcaaaaguaauugagauuuuug

SEQ ID NO: 1978 - RNA, 22 nt, Homo sapiens
caaaaaccacaguuucuuuugc

SEQ ID NO: 1979 - RNA, 22 nt, Homo sapiens
gcaaaagaaacugugguuuuug

SEQ ID NO: 1980 - RNA, 22 nt, Homo sapiens
aaaaguaauugugguuuuugcc

SEQ ID NO: 1981 - RNA, 22 nt, Homo sapiens
ggcaaaaaccacaauuacuuuu

SEQ ID NO: 1982 - RNA, 21 nt, Homo sapiens
ugacaacuauggaugagcucu

SEQ ID NO: 1983 - RNA, 21 nt, Homo sapiens
agagcucauccauaguuguca

SEQ ID NO: 1984 - RNA, 21 nt, Homo sapiens
aacaggugacugguuagacaa

SEQ ID NO: 1985 - RNA, 21 nt, Homo sapiens
uugucuaaccagucaccuguu

SEQ ID NO: 1986 - RNA, 21 nt, Homo sapiens
aaaacggugagauuuuguuuu

SEQ ID NO: 1987 - RNA, 21 nt, Homo sapiens
aaaacaaaaucucaccguuuu

SEQ ID NO: 1988 - RNA, 21 nt, Homo sapiens
gcuaguccugacucagccagu

SEQ ID NO: 1989 - RNA, 21 nt, Homo sapiens
acuggcugagucaggacuagc

SEQ ID NO: 1990 - RNA, 21 nt, Homo sapiens
aggguaagcugaaccucugau

SEQ ID NO: 1991 - RNA, 21 nt, Homo sapiens
aucagagguucagcuuacccu

SEQ ID NO: 1992 - RNA, 22 nt, Homo sapiens
auauuaccauuagcucaucuuu

SEQ ID NO: 1993 - RNA, 22 nt, Homo sapiens
aaagaugagcuaaugguaauau

SEQ ID NO: 1994 - RNA, 22 nt, Homo sapiens
gaugagcucauuguaauaugag

SEQ ID NO: 1995 - RNA, 22 nt, Homo sapiens
cucauauuacaaugagcucauc

SEQ ID NO: 1996 - RNA, 19 nt, Homo sapiens
agguugacauacguuuccc

SEQ ID NO: 1997 - RNA, 19 nt, Homo sapiens
gggaaacguaugucaaccu

SEQ ID NO: 1998 - RNA, 20 nt, Homo sapiens
auguauaaauguauacacac

SEQ ID NO: 1999 - RNA, 20 nt, Homo sapiens
guguguauacauuuauacau

SEQ ID NO: 2000 - RNA, 24 nt, Homo sapiens
cugaagugauguguaacugaucag

SEQ ID NO: 2001 - RNA, 24 nt, Homo sapiens
cugaucaguuacacaucacuucag

SEQ ID NO: 2002 - RNA, 22 nt, Homo sapiens
aagauguggaaaaauuggaauc

SEQ ID NO: 2003 - RNA, 22 nt, Homo sapiens
gauuccaauuuuuccacaucuu

SEQ ID NO: 2004 - RNA, 21 nt, Homo sapiens
uagauaaaauauugguaccug

SEQ ID NO: 2005 - RNA, 21 nt, Homo sapiens
cagguaccaauauuuuaucua

SEQ ID NO: 2006 - RNA, 21 nt, Homo sapiens
cuucuugugcucuaggauugu

SEQ ID NO: 2007 - RNA, 21 nt, Homo sapiens
acaauccuagagcacaagaag

SEQ ID NO: 2008 - RNA, 22 nt, Homo sapiens
uaugcauuguauuuuuaggucc

SEQ ID NO: 2009 - RNA, 22 nt, Homo sapiens
ggaccuaaaaauacaaugcaua

SEQ ID NO: 2010 - RNA, 21 nt, Homo sapiens
uuuccauaggugaugagucac

SEQ ID NO: 2011 - RNA, 21 nt, Homo sapiens
gugacucaucaccuauggaaa

SEQ ID NO: 2012 - RNA, 21 nt, Homo sapiens
uuggccacaauggguuagaac

SEQ ID NO: 2013 - RNA, 21 nt, Homo sapiens
guucuaacccauuguggccaa

SEQ ID NO: 2014 - RNA, 22 nt, Homo sapiens
ugugucacucgaugaccacugu

SEQ ID NO: 2015 - RNA, 22 nt, Homo sapiens
acaguggucaucgagugacaca

SEQ ID NO: 2016 - RNA, 23 nt, Homo sapiens
acuuacagacaagagccuugcuc

SEQ ID NO: 2017 - RNA, 23 nt, Homo sapiens
gagcaaggcucuugucuguaagu

SEQ ID NO: 2018 - RNA, 19 nt, Homo sapiens
aggcugcggaauucaggac

SEQ ID NO: 2019 - RNA, 19 nt, Homo sapiens
guccugaauuccgcagccu

SEQ ID NO: 2020 - RNA, 23 nt, Homo sapiens
uaaaucccauggugccuucuccu

SEQ ID NO: 2021 - RNA, 23 nt, Homo sapiens
aggagaaggcaccaugggauuua

SEQ ID NO: 2022 - RNA, 21 nt, Homo sapiens
aaacuacugaaaaucaaagau

SEQ ID NO: 2023 - RNA, 21 nt, Homo sapiens
aucuuugauuuucaguaguuu

SEQ ID NO: 2024 - RNA, 21 nt, Homo sapiens
guucaaauccagaucuauaac

SEQ ID NO: 2025 - RNA, 21 nt, Homo sapiens
guuauagaucuggauuugaac

SEQ ID NO: 2026 - RNA, 19 nt, Homo sapiens
ccgguuccagucccuggag

SEQ ID NO: 2027 - RNA, 19 nt, Homo sapiens
cuccagggacuggaaccgg

SEQ ID NO: 2028 - RNA, 20 nt, Homo sapiens
aggguguuucucucaucucu

SEQ ID NO: 2029 - RNA, 20 nt, Homo sapiens
agagaugagagaaacacccu

SEQ ID NO: 2030 - RNA, 24 nt, Homo sapiens
gaccuggacauguuugugcccagu

SEQ ID NO: 2031 - RNA, 24 nt, Homo sapiens
acugggcacaaacauguccagguc

SEQ ID NO: 2032 - RNA, 20 nt, Homo sapiens
auggagauagauauagaaau

SEQ ID NO: 2033 - RNA, 20 nt, Homo sapiens
auuucuauaucuaucuccau

SEQ ID NO: 2034 - RNA, 19 nt, Homo sapiens
agcugucugaaaaugucuu

SEQ ID NO: 2035 - RNA, 19 nt, Homo sapiens
aagacauuuucagacagcu

SEQ ID NO: 2036 - RNA, 21 nt, Homo sapiens
agaccuggcccagaccucagc

SEQ ID NO: 2037 - RNA, 21 nt, Homo sapiens
gcugaggucugggccaggucu

SEQ ID NO: 2038 - RNA, 23 nt, Homo sapiens
acuugggcacugaaacaaugucc

SEQ ID NO: 2039 - RNA, 23 nt, Homo sapiens
ggacauuguuucagugcccaagu

SEQ ID NO: 2040 - RNA, 24 nt, Homo sapiens
acugggggcuuucgggcucugcgu

SEQ ID NO: 2041 - RNA, 24 nt, Homo sapiens
acgcagagcccgaaagcccccagu

SEQ ID NO: 2042 - RNA, 23 nt, Homo sapiens
aucgcugcgguugcgagcgcugu

SEQ ID NO: 2043 - RNA, 23 nt, Homo sapiens
acagcgcucgcaaccgcagcgau

SEQ ID NO: 2044 - RNA, 22 nt, Homo sapiens
gucccucuccaaaugugucuug

SEQ ID NO: 2045 - RNA, 22 nt, Homo sapiens
caagacacauuuggagagggac

SEQ ID NO: 2046 - RNA, 22 nt, Homo sapiens
acuuguaugcuagcucagguag

SEQ ID NO: 2047 - RNA, 22 nt, Homo sapiens
cuaccugagcuagcauacaagu

SEQ ID NO: 2048 - RNA, 22 nt, Homo sapiens
uuuaggauaagcuugacuuuug

SEQ ID NO: 2049 - RNA, 22 nt, Homo sapiens
caaaagucaagcuuauccuaaa

SEQ ID NO: 2050 - RNA, 21 nt, Homo sapiens
guguugaaacaaucucuacug

SEQ ID NO: 2051 - RNA, 21 nt, Homo sapiens
caguagagauuguuucaacac

SEQ ID NO: 2052 - RNA, 22 nt, Homo sapiens
uaugucugcugaccaucaccuu

SEQ ID NO: 2053 - RNA, 22 nt, Homo sapiens
aaggugauggucagcagacaua

SEQ ID NO: 2054 - RNA, 22 nt, Homo sapiens
ggggcuggggccggggccgagc

SEQ ID NO: 2055 - RNA, 22 nt, Homo sapiens
gcucggccccggccccagcccc

SEQ ID NO: 2056 - RNA, 22 nt, Homo sapiens
ugagguaguagguuguaugguu

SEQ ID NO: 2057 - RNA, 22 nt, Homo sapiens
aaccauacaaccuacuaccuca

SEQ ID NO: 2058 - RNA, 21 nt, Homo sapiens
gugucuuuugcucugcaguca

SEQ ID NO: 2059 - RNA, 21 nt, Homo sapiens
ugacugcagagcaaaagacac

SEQ ID NO: 2060 - RNA, 24 nt, Homo sapiens
ccccgggaacgucgagacuggagc

SEQ ID NO: 2061 - RNA, 24 nt, Homo sapiens
gcuccagucucgacguucccgggg

SEQ ID NO: 2062 - RNA, 22 nt, Homo sapiens
acccgucccguucguccccgga

SEQ ID NO: 2063 - RNA, 22 nt, Homo sapiens
uccggggacgaacgggacgggu

SEQ ID NO: 2064 - RNA, 22 nt, Homo sapiens
augggugaauuuguagaaggau

SEQ ID NO: 2065 - RNA, 22 nt, Homo sapiens
auccuucuacaaauucacccau

SEQ ID NO: 2066 - RNA, 22 nt, Homo sapiens
cuggacugagccgugcuacugg

SEQ ID NO: 2067 - RNA, 22 nt, Homo sapiens
ccaguagcacggcucaguccag

SEQ ID NO: 2068 - RNA, 22 nt, Homo sapiens
cuggacugagccaugcuacugg

SEQ ID NO: 2069 - RNA, 22 nt, Homo sapiens
ccaguagcauggcucaguccag

SEQ ID NO: 2070 - RNA, 22 nt, Homo sapiens
uacguagauauauauguauuuu

SEQ ID NO: 2071 - RNA, 22 nt, Homo sapiens
aaaauacauauauaucuacgua

SEQ ID NO: 2072 - RNA, 24 nt, Homo sapiens
aaauauauauauauauguacguau

SEQ ID NO: 2073 - RNA, 22 nt, Homo sapiens
gcucuuuucauuaauguagaca

SEQ ID NO: 2074 - RNA, 22 nt, Homo sapiens
ugcuggaucagugguucgaguc

SEQ ID NO: 2075 - RNA, 22 nt, Homo sapiens
gacucgaaccacugauccagca

SEQ ID NO: 2076 - RNA, 19 nt, Homo sapiens
uggauuuuuggaucaggga

SEQ ID NO: 2077 - RNA, 19 nt, Homo sapiens
ucccugauccaaaaaucca

SEQ ID NO: 2078 - RNA, 22 nt, Homo sapiens
uuauaaagcaaugagacugauu

SEQ ID NO: 2079 - RNA, 22 nt, Homo sapiens
aaucagucucauugcuuuauaa

SEQ ID NO: 2080 - RNA, 23 nt, Homo sapiens
uagugcaauauugcuuauagggu

SEQ ID NO: 2081 - RNA, 23 nt, Homo sapiens
acccuauaagcaauauugcacua

SEQ ID NO: 2082 - RNA, 22 nt, Homo sapiens
acccuaucaauauugucucugc

SEQ ID NO: 2083 - RNA, 22 nt, Homo sapiens
gcagagacaauauugauagggu

SEQ ID NO: 2084 - RNA, 17 nt, Homo sapiens
uaagugcuuccaugcuu

SEQ ID NO: 2085 - RNA, 17 nt, Homo sapiens
aagcauggaagcacuua

SEQ ID NO: 2086 - RNA, 22 nt, Homo sapiens
ucggccugaccacccaccccac

SEQ ID NO: 2087 - RNA, 22 nt, Homo sapiens
gugggguggguggucaggccga

SEQ ID NO: 2088 - RNA, 21 nt, Homo sapiens
ggggggggggggggggggccg

SEQ ID NO: 2089 - RNA, 21 nt, Homo sapiens
cggcccccccccccccccccc

SEQ ID NO: 2090 - RNA, 22 nt, Homo sapiens
cuauacgaccugcugccuuucu

SEQ ID NO: 2091 - RNA, 22 nt, Homo sapiens
agaaaggcagcaggucguauag

SEQ ID NO: 2092 - RNA, 22 nt, Homo sapiens
agagguaguagguugcauaguu

SEQ ID NO: 2093 - RNA, 22 nt, Homo sapiens
aacuaugcaaccuacuaccucu

SEQ ID NO: 2094 - RNA, 22 nt, Homo sapiens
ccgcacuguggguacuugcugc

SEQ ID NO: 2095 - RNA, 22 nt, Homo sapiens
gcagcaaguacccacagugcgg

SEQ ID NO: 2096 - RNA, 21 nt, Homo sapiens
uaaagugcugacagugcagau

SEQ ID NO: 2097 - RNA, 21 nt, Homo sapiens
aucugcacugucagcacuuua

SEQ ID NO: 2098 - RNA, 22 nt, Homo sapiens
aacuggaucaauuauaggagug

SEQ ID NO: 2099 - RNA, 22 nt, Homo sapiens
cacuccuauaauugauccaguu

SEQ ID NO: 2100 - RNA, 26 nt, Homo sapiens
aaguaguugguuuguaugagaugguu

SEQ ID NO: 2101 - RNA, 26 nt, Homo sapiens
aaccaucucauacaaaccaacuacuu

SEQ ID NO: 2102 - RNA, 21 nt, Homo sapiens
aagugaucuaaaggccuacau

SEQ ID NO: 2103 - RNA, 21 nt, Homo sapiens
auguaggccuuuagaucacuu

SEQ ID NO: 2104 - RNA, 22 nt, Homo sapiens
ucagaugaucuaaaggccuaua

SEQ ID NO: 2105 - RNA, 22 nt, Homo sapiens
uauaggccuuuagaucaucuga

SEQ ID NO: 2106 - RNA, 21 nt, Homo sapiens
uaggccuuuagaucacuuaaa

SEQ ID NO: 2107 - RNA, 21 nt, Homo sapiens
uuuaagugaucuaaaggccua

SEQ ID NO: 2108 - RNA, 21 nt, Homo sapiens
acucuagcugccaaaggcgcu

SEQ ID NO: 2109 - RNA, 21 nt, Homo sapiens
agcgccuuuggcagcuagagu

SEQ ID NO: 2110 - RNA, 22 nt, Homo sapiens
agaaggaaauugaauucauuua

SEQ ID NO: 2111 - RNA, 22 nt, Homo sapiens
uaaaugaauucaauuuccuucu

SEQ ID NO: 2112 - RNA, 21 nt, Homo sapiens
agagaagaagaucagccugca

SEQ ID NO: 2113 - RNA, 21 nt, Homo sapiens
ugcaggcugaucuucuucucu

SEQ ID NO: 2114 - RNA, 24 nt, Homo sapiens
agccuggaagcuggagccugcagu

SEQ ID NO: 2115 - RNA, 24 nt, Homo sapiens
acugcaggcuccagcuuccaggcu

SEQ ID NO: 2116 - RNA, 23 nt, Homo sapiens
aggaugagcaaagaaaguagauu

SEQ ID NO: 2117 - RNA, 23 nt, Homo sapiens
aaucuacuuucuuugcucauccu

SEQ ID NO: 2118 - RNA, 22 nt, Homo sapiens
aaccacuuucuuugcucaucca

SEQ ID NO: 2119 - RNA, 22 nt, Homo sapiens
uggaugagcaaagaaagugguu

SEQ ID NO: 2120 - RNA, 22 nt, Homo sapiens
cggaugagcaaagaaagugguu

SEQ ID NO: 2121 - RNA, 22 nt, Homo sapiens
aaccacuuucuuugcucauccg

SEQ ID NO: 2122 - RNA, 22 nt, Homo sapiens
aggcauugacuucucacuagcu

SEQ ID NO: 2123 - RNA, 22 nt, Homo sapiens
agcuagugagaagucaaugccu

SEQ ID NO: 2124 - RNA, 21 nt, Homo sapiens
agugaaugauggguucugacc

SEQ ID NO: 2125 - RNA, 21 nt, Homo sapiens
ggucagaacccaucauucacu

SEQ ID NO: 2126 - RNA, 21 nt, Homo sapiens
aguuaggauuaggucguggaa

SEQ ID NO: 2127 - RNA, 21 nt, Homo sapiens
uuccacgaccuaauccuaacu

SEQ ID NO: 2128 - RNA, 19 nt, Homo sapiens
auggauaaggcuuuggcuu

SEQ ID NO: 2129 - RNA, 19 nt, Homo sapiens
aagccaaagccuuauccau

SEQ ID NO: 2130 - RNA, 22 nt, Homo sapiens
augguacccuggcauacugagu

SEQ ID NO: 2131 - RNA, 22 nt, Homo sapiens
acucaguaugccaggguaccau

SEQ ID NO: 2132 - RNA, 23 nt, Homo sapiens
caagucuuauuugagcaccuguu

SEQ ID NO: 2133 - RNA, 23 nt, Homo sapiens
aacaggugcucaaauaagacuug

SEQ ID NO: 2134 - RNA, 22 nt, Homo sapiens
caggauguggucaaguguuguu

SEQ ID NO: 2135 - RNA, 22 nt, Homo sapiens
aacaacacuugaccacauccug

SEQ ID NO: 2136 - RNA, 23 nt, Homo sapiens
ccucagggcuguagaacagggcu

SEQ ID NO: 2137 - RNA, 23 nt, Homo sapiens
agcccuguucuacagcccugagg

SEQ ID NO: 2138 - RNA, 21 nt, Homo sapiens
ccuguugaaguguaaucccca

SEQ ID NO: 2139 - RNA, 21 nt, Homo sapiens
uggggauuacacuucaacagg

SEQ ID NO: 2140 - RNA, 18 nt, Homo sapiens
cgggcguggugguggggg

SEQ ID NO: 2141 - RNA, 18 nt, Homo sapiens
cccccaccaccacgcccg

SEQ ID NO: 2142 - RNA, 20 nt, Homo sapiens
cgggcgugguggugggggug

SEQ ID NO: 2143 - RNA, 20 nt, Homo sapiens
cacccccaccaccacgcccg

SEQ ID NO: 2144 - RNA, 23 nt, Homo sapiens
cuggagauauggaagagcugugu

SEQ ID NO: 2145 - RNA, 23 nt, Homo sapiens
acacagcucuuccauaucuccag

SEQ ID NO: 2146 - RNA, 26 nt, Homo sapiens
gaugaugauggcagcaaauucugaaa

SEQ ID NO: 2147 - RNA, 26 nt, Homo sapiens
uuucagaauuugcugccaucaucauc

SEQ ID NO: 2148 - RNA, 25 nt, Homo sapiens
gggcgacaaagcaagacucuuucuu

SEQ ID NO: 2149 - RNA, 25 nt, Homo sapiens
aagaaagagucuugcuuugucgccc

SEQ ID NO: 2150 - RNA, 25 nt, Homo sapiens
gaacccaugagguugaggcugcagu

SEQ ID NO: 2151 - RNA, 25 nt, Homo sapiens
acugcagccucaaccucauggguuc

SEQ ID NO: 2152 - RNA, 17 nt, Homo sapiens
gugggggagaggcuguc

SEQ ID NO: 2153 - RNA, 17 nt, Homo sapiens
gacagccucucccccac

SEQ ID NO: 2154 - RNA, 20 nt, Homo sapiens
uaaagagcccuguggagaca

SEQ ID NO: 2155 - RNA, 20 nt, Homo sapiens
ugucuccacagggcucuuua

SEQ ID NO: 2156 - RNA, 22 nt, Homo sapiens
uaguacugugcauaucaucuau

SEQ ID NO: 2157 - RNA, 22 nt, Homo sapiens
auagaugauaugcacaguacua

SEQ ID NO: 2158 - RNA, 20 nt, Homo sapiens
ucguuugccuuuuucugcuu

SEQ ID NO: 2159 - RNA, 20 nt, Homo sapiens
aagcagaaaaaggcaaacga

SEQ ID NO: 2160 - RNA, 21 nt, Homo sapiens
uggacugcccugaucuggaga

SEQ ID NO: 2161 - RNA, 21 nt, Homo sapiens
ucuccagaucagggcagucca

SEQ ID NO: 2162 - RNA, 22 nt, Homo sapiens
uggguggucuggagauuugugc

SEQ ID NO: 2163 - RNA, 22 nt, Homo sapiens
gcacaaaucuccagaccaccca

SEQ ID NO: 2164 - RNA, 22 nt, Homo sapiens
ugugagguuggcauuguugucu

SEQ ID NO: 2165 - RNA, 22 nt, Homo sapiens
agacaacaaugccaaccucaca

SEQ ID NO: 2166 - RNA, 17 nt, Homo sapiens
uucaaguaauucaggug

SEQ ID NO: 2167 - RNA, 17 nt, Homo sapiens
caccugaauuacuugaa

SEQ ID NO: 2168 - RNA, 22 nt, Homo sapiens
uucuggaauucugugugaggga

SEQ ID NO: 2169 - RNA, 22 nt, Homo sapiens
ucccucacacagaauuccagaa

SEQ ID NO: 2170 - RNA, 22 nt, Homo sapiens
uuuucaacucuaaugggagaga

SEQ ID NO: 2171 - RNA, 22 nt, Homo sapiens
ucucucccauuagaguugaaaa

SEQ ID NO: 2172 - RNA, 18 nt, Homo sapiens
acguuggcucugguggug

SEQ ID NO: 2173 - RNA, 18 nt, Homo sapiens
caccaccagagccaacgu

SEQ ID NO: 2174 - RNA, 22 nt, Homo sapiens
ccaccuccccugcaaacgucca

SEQ ID NO: 2175 - RNA, 22 nt, Homo sapiens
uggacguuugcaggggaggugg

SEQ ID NO: 2176 - RNA, 22 nt, Homo sapiens
acucggcguggcgucggucgug

SEQ ID NO: 2177 - RNA, 22 nt, Homo sapiens
cacgaccgacgccacgccgagu

SEQ ID NO: 2178 - RNA, 21 nt, Homo sapiens
ucgaccggaccucgaccggcu

SEQ ID NO: 2179 - RNA, 21 nt, Homo sapiens
agccggucgagguccggucga

SEQ ID NO: 2180 - RNA, 22 nt, Homo sapiens
ugagaacugaauuccauaggcu

SEQ ID NO: 2181 - RNA, 22 nt, Homo sapiens
agccuauggaauucaguucuca

SEQ ID NO: 2182 - RNA, 22 nt, Homo sapiens
aaucauacacgguugaccuauu

SEQ ID NO: 2183 - RNA, 22 nt, Homo sapiens
aauaggucaaccguguaugauu

SEQ ID NO: 2184 - RNA, 22 nt, Homo sapiens
uagguuauccguguugccuucg

SEQ ID NO: 2185 - RNA, 22 nt, Homo sapiens
cgaaggcaacacggauaaccua

SEQ ID NO: 2186 - RNA, 21 nt, Homo sapiens
ccaguccugugccugccgccu

SEQ ID NO: 2187 - RNA, 21 nt, Homo sapiens
aggcggcaggcacaggacugg

SEQ ID NO: 2188 - RNA, 22 nt, Homo sapiens
ucugcccccuccgcugcugcca

SEQ ID NO: 2189 - RNA, 22 nt, Homo sapiens
uggcagcagcggagggggcaga

SEQ ID NO: 2190 - RNA, 22 nt, Homo sapiens
ggaggggucccgcacugggagg

SEQ ID NO: 2191 - RNA, 22 nt, Homo sapiens
ccucccagugcgggaccccucc

SEQ ID NO: 2192 - RNA, 22 nt, Homo sapiens
cccugugcccggcccacuucug

SEQ ID NO: 2193 - RNA, 22 nt, Homo sapiens
cagaagugggccgggcacaggg

SEQ ID NO: 2194 - RNA, 20 nt, Homo sapiens
ccccagggcgacgcggcggg

SEQ ID NO: 2195 - RNA, 20 nt, Homo sapiens
cccgccgcgucgcccugggg

SEQ ID NO: 2196 - RNA, 22 nt, Homo sapiens
accuugccuugcugcccgggcc

SEQ ID NO: 2197 - RNA, 22 nt, Homo sapiens
ggcccgggcagcaaggcaaggu

SEQ ID NO: 2198 - RNA, 21 nt, Homo sapiens
auuugugcuuggcucugucac

SEQ ID NO: 2199 - RNA, 21 nt, Homo sapiens
gugacagagccaagcacaaau

SEQ ID NO: 2200 - RNA, 22 nt, Homo sapiens
auuguccuugcuguuuggagau

SEQ ID NO: 2201 - RNA, 22 nt, Homo sapiens
aucuccaaacagcaaggacaau

SEQ ID NO: 2202 - RNA, 21 nt, Homo sapiens
auccccagauacaauggacaa

SEQ ID NO: 2203 - RNA, 21 nt, Homo sapiens
uuguccauuguaucuggggau

SEQ ID NO: 2204 - RNA, 23 nt, Homo sapiens
cagugcaauaguauugucaaagc

SEQ ID NO: 2205 - RNA, 23 nt, Homo sapiens
gcuuugacaauacuauugcacug

SEQ ID NO: 2206 - RNA, 22 nt, Homo sapiens
gcucugacuuuauugcacuacu

SEQ ID NO: 2207 - RNA, 22 nt, Homo sapiens
aguagugcaauaaagucagagc

SEQ ID NO: 2208 - RNA, 23 nt, Homo sapiens
uaagugcuuccauguuuuaguag

SEQ ID NO: 2209 - RNA, 23 nt, Homo sapiens
cuacuaaaacauggaagcacuua

SEQ ID NO: 2210 - RNA, 22 nt, Homo sapiens
acuuuaacauggaagugcuuuc

SEQ ID NO: 2211 - RNA, 22 nt, Homo sapiens
gaaagcacuuccauguuaaagu

SEQ ID NO: 2212 - RNA, 23 nt, Homo sapiens
uaagugcuuccauguuucagugg

SEQ ID NO: 2213 - RNA, 23 nt, Homo sapiens
ccacugaaacauggaagcacuua

SEQ ID NO: 2214 - RNA, 22 nt, Homo sapiens
uuuaacauggggguaccugcug

SEQ ID NO: 2215 - RNA, 22 nt, Homo sapiens
cagcagguacccccauguuaaa

SEQ ID NO: 2216 - RNA, 23 nt, Homo sapiens
uaagugcuuccauguuugagugu

SEQ ID NO: 2217 - RNA, 23 nt, Homo sapiens
acacucaaacauggaagcacuua

SEQ ID NO: 2218 - RNA, 22 nt, Homo sapiens
acuuuaacauggaggcacuugc

SEQ ID NO: 2219 - RNA, 22 nt, Homo sapiens
gcaagugccuccauguuaaagu

SEQ ID NO: 2220 - RNA, 22 nt, Homo sapiens
aauugcacuuuagcaaugguga

SEQ ID NO: 2221 - RNA, 22 nt, Homo sapiens
ucaccauugcuaaagugcaauu

SEQ ID NO: 2222 - RNA, 22 nt, Homo sapiens
acuguugcuaauaugcaacucu

SEQ ID NO: 2223 - RNA, 22 nt, Homo sapiens
agaguugcauauuagcaacagu

SEQ ID NO: 2224 - RNA, 23 nt, Homo sapiens
agcucggucugaggccccucagu

SEQ ID NO: 2225 - RNA, 23 nt, Homo sapiens
acugaggggccucagaccgagcu

SEQ ID NO: 2226 - RNA, 22 nt, Homo sapiens
aaaaacugagacuacuuuugca

SEQ ID NO: 2227 - RNA, 22 nt, Homo sapiens
ugcaaaaguagucucaguuuuu

SEQ ID NO: 2228 - RNA, 19 nt, Homo sapiens
aaaaacuguaauuacuuuu

SEQ ID NO: 2229 - RNA, 19 nt, Homo sapiens
aaaaguaauuacaguuuuu

SEQ ID NO: 2230 - RNA, 22 nt, Homo sapiens
aaaacuguaauuacuuuuguac

SEQ ID NO: 2231 - RNA, 22 nt, Homo sapiens
guacaaaaguaauuacaguuuu

SEQ ID NO: 2232 - RNA, 23 nt, Homo sapiens
ugcaaaaguaauugcaguuuuug

SEQ ID NO: 2233 - RNA, 23 nt, Homo sapiens
caaaaacugcaauuacuuuugca

SEQ ID NO: 2234 - RNA, 23 nt, Homo sapiens
caaaaaccgcaauuacuuuugca

SEQ ID NO: 2235 - RNA, 23 nt, Homo sapiens
ugcaaaaguaauugcgguuuuug

SEQ ID NO: 2236 - RNA, 22 nt, Homo sapiens
aaaaguaaucgcgguuuuuguc

SEQ ID NO: 2237 - RNA, 22 nt, Homo sapiens
gacaaaaaccgcgauuacuuuu

SEQ ID NO: 2238 - RNA, 22 nt, Homo sapiens
aaaaguacuugcggauuuugcu

SEQ ID NO: 2239 - RNA, 22 nt, Homo sapiens
agcaaaauccgcaaguacuuuu

SEQ ID NO: 2240 - RNA, 22 nt, Homo sapiens
aaaaguauuugcggguuuuguc

SEQ ID NO: 2241 - RNA, 22 nt, Homo sapiens
gacaaaacccgcaaauacuuuu

SEQ ID NO: 2242 - RNA, 21 nt, Homo sapiens
caaagguauuugugguuuuug

SEQ ID NO: 2243 - RNA, 21 nt, Homo sapiens
caaaaaccacaaauaccuuug

SEQ ID NO: 2244 - RNA, 22 nt, Homo sapiens
ccaaaacugcaguuacuuuugc

SEQ ID NO: 2245 - RNA, 22 nt, Homo sapiens
gcaaaaguaacugcaguuuugg

SEQ ID NO: 2246 - RNA, 22 nt, Homo sapiens
aaaaguaauugcgguuuuugcc

SEQ ID NO: 2247 - RNA, 22 nt, Homo sapiens
ggcaaaaaccgcaauuacuuuu

SEQ ID NO: 2248 - RNA, 22 nt, Homo sapiens
uagcaaaaacugcaguuacuuu

SEQ ID NO: 2249 - RNA, 22 nt, Homo sapiens
aaaguaacugcaguuuuugcua

SEQ ID NO: 2250 - RNA, 20 nt, Homo sapiens
ggagguugggaagggcagag

SEQ ID NO: 2251 - RNA, 20 nt, Homo sapiens
cucugcccuucccaaccucc

SEQ ID NO: 2252 - RNA, 18 nt, Homo sapiens
ugaggcgggggggcgagc

SEQ ID NO: 2253 - RNA, 18 nt, Homo sapiens
gcucgcccccccgccuca

SEQ ID NO: 2254 - RNA, 20 nt, Homo sapiens
agagaugaagcgggggggcg

SEQ ID NO: 2255 - RNA, 20 nt, Homo sapiens
cgcccccccgcuucaucucu

SEQ ID NO: 2256 - RNA, 24 nt, Homo sapiens
ggaggccgggguggggcggggcgg

SEQ ID NO: 2257 - RNA, 24 nt, Homo sapiens
ccgccccgccccaccccggccucc

SEQ ID NO: 2258 - RNA, 19 nt, Homo sapiens
ggggagcgaggggcggggc

SEQ ID NO: 2259 - RNA, 19 nt, Homo sapiens
gccccgccccucgcucccc

SEQ ID NO: 2260 - RNA, 23 nt, Homo sapiens
uauucauuuauccccagccuaca

SEQ ID NO: 2261 - RNA, 23 nt, Homo sapiens
uguaggcuggggauaaaugaaua

SEQ ID NO: 2262 - RNA, 24 nt, Homo sapiens
acuggcuagggaaaaugauuggau

SEQ ID NO: 2263 - RNA, 24 nt, Homo sapiens
auccaaucauuuucccuagccagu

SEQ ID NO: 2264 - RNA, 22 nt, Homo sapiens
uucauuugccucccagccuaca

SEQ ID NO: 2265 - RNA, 22 nt, Homo sapiens
uguaggcugggaggcaaaugaa

SEQ ID NO: 2266 - RNA, 24 nt, Homo sapiens
ugggcuaagggagaugauugggua

SEQ ID NO: 2267 - RNA, 24 nt, Homo sapiens
uacccaaucaucucccuuagccca

SEQ ID NO: 2268 - RNA, 22 nt, Homo sapiens
acuccagccccacagccucagc

SEQ ID NO: 2269 - RNA, 22 nt, Homo sapiens
gcugaggcuguggggcuggagu

SEQ ID NO: 2270 - RNA, 22 nt, Homo sapiens
aggaggaauuggugcuggucuu

SEQ ID NO: 2271 - RNA, 22 nt, Homo sapiens
aagaccagcaccaauuccuccu

SEQ ID NO: 2272 - RNA, 22 nt, Homo sapiens
aggcagcgggguguaguggaua

SEQ ID NO: 2273 - RNA, 22 nt, Homo sapiens
uauccacuacaccccgcugccu

SEQ ID NO: 2274 - RNA, 22 nt, Homo sapiens
uccauuacacuacccugccucu

SEQ ID NO: 2275 - RNA, 22 nt, Homo sapiens
agaggcaggguaguguaaugga

SEQ ID NO: 2276 - RNA, 22 nt, Homo sapiens
acugcugagcuagcacuucccg

SEQ ID NO: 2277 - RNA, 22 nt, Homo sapiens
cgggaagugcuagcucagcagu

SEQ ID NO: 2278 - RNA, 23 nt, Homo sapiens
caaagugcuguucgugcagguag

SEQ ID NO: 2279 - RNA, 23 nt, Homo sapiens
cuaccugcacgaacagcacuuug

SEQ ID NO: 2280 - RNA, 23 nt, Homo sapiens
cacccggcugugugcacaugugc

SEQ ID NO: 2281 - RNA, 23 nt, Homo sapiens
gcacaugugcacacagccgggug

SEQ ID NO: 2282 - RNA, 23 nt, Homo sapiens
agcuucuuuacagugcugccuug

SEQ ID NO: 2283 - RNA, 23 nt, Homo sapiens
caaggcagcacuguaaagaagcu

SEQ ID NO: 2284 - RNA, 23 nt, Homo sapiens
agcagcauuguacagggcuauga

SEQ ID NO: 2285 - RNA, 23 nt, Homo sapiens
ucauagcccuguacaaugcugcu

SEQ ID NO: 2286 - RNA, 17 nt, Homo sapiens
ccugagaaaagggccaa

SEQ ID NO: 2287 - RNA, 17 nt, Homo sapiens
uuggcccuuuucucagg

SEQ ID NO: 2288 - RNA, 19 nt, Homo sapiens
ggccacugagucagcacca

SEQ ID NO: 2289 - RNA, 19 nt, Homo sapiens
uggugcugacucaguggcc

SEQ ID NO: 2290 - RNA, 18 nt, Homo sapiens
agggcauguccagggggu

SEQ ID NO: 2291 - RNA, 18 nt, Homo sapiens
acccccuggacaugcccu

SEQ ID NO: 2292 - RNA, 23 nt, Homo sapiens
gccuggagcuacuccaccaucuc

SEQ ID NO: 2293 - RNA, 23 nt, Homo sapiens
gagaugguggaguagcuccaggc

SEQ ID NO: 2294 - RNA, 17 nt, Homo sapiens
caguguucagagaugga

SEQ ID NO: 2295 - RNA, 17 nt, Homo sapiens
uccaucucugaacacug

SEQ ID NO: 2296 - RNA, 18 nt, Homo sapiens
aucugaccugaugaaggu

SEQ ID NO: 2297 - RNA, 18 nt, Homo sapiens
accuucaucaggucagau

SEQ ID NO: 2298 - RNA, 18 nt, Homo sapiens
ccagagguggggacugag

SEQ ID NO: 2299 - RNA, 18 nt, Homo sapiens
cucaguccccaccucugg

SEQ ID NO: 2300 - RNA, 17 nt, Homo sapiens
ccccgccaccgccuugg

SEQ ID NO: 2301 - RNA, 17 nt, Homo sapiens
ccaaggcgguggcgggg

SEQ ID NO: 2302 - RNA, 22 nt, Homo sapiens
caguugggucuaggggucagga

SEQ ID NO: 2303 - RNA, 22 nt, Homo sapiens
uccugaccccuagacccaacug

SEQ ID NO: 2304 - RNA, 19 nt, Homo sapiens
cuuggggcauggaguccca

SEQ ID NO: 2305 - RNA, 19 nt, Homo sapiens
ugggacuccaugccccaag

SEQ ID NO: 2306 - RNA, 16 nt, Homo sapiens
aggaaacagggaccca

SEQ ID NO: 2307 - RNA, 16 nt, Homo sapiens
ugggucccuguuuccu

SEQ ID NO: 2308 - RNA, 17 nt, Homo sapiens
gacauucagacuaccug

SEQ ID NO: 2309 - RNA, 17 nt, Homo sapiens
cagguagucugaauguc

SEQ ID NO: 2310 - RNA, 18 nt, Homo sapiens
auucuaagugccuuggcc

SEQ ID NO: 2311 - RNA, 18 nt, Homo sapiens
ggccaaggcacuuagaau

SEQ ID NO: 2312 - RNA, 17 nt, Homo sapiens
acucagucauggucauu

SEQ ID NO: 2313 - RNA, 17 nt, Homo sapiens
aaugaccaugacugagu

SEQ ID NO: 2314 - RNA, 19 nt, Homo sapiens
cugugggcucagcucuggg

SEQ ID NO: 2315 - RNA, 19 nt, Homo sapiens
cccagagcugagcccacag

SEQ ID NO: 2316 - RNA, 16 nt, Homo sapiens
cuaggaggccuuggcc

SEQ ID NO: 2317 - RNA, 16 nt, Homo sapiens
ggccaaggccuccuag

SEQ ID NO: 2318 - RNA, 16 nt, Homo sapiens
uccagcucgguggcac

SEQ ID NO: 2319 - RNA, 16 nt, Homo sapiens
gugccaccgagcugga

SEQ ID NO: 2320 - RNA, 21 nt, Homo sapiens
ggcuccuccucucaggaugug

SEQ ID NO: 2321 - RNA, 21 nt, Homo sapiens
cacauccugagaggaggagcc

SEQ ID NO: 2322 - RNA, 21 nt, Homo sapiens
gcaggcacagacagcccuggc

SEQ ID NO: 2323 - RNA, 21 nt, Homo sapiens
gccagggcugucugugccugc

SEQ ID NO: 2324 - RNA, 20 nt, Homo sapiens
ucagggagucaggggagggc

SEQ ID NO: 2325 - RNA, 20 nt, Homo sapiens
gcccuccccugacucccuga

SEQ ID NO: 2326 - RNA, 19 nt, Homo sapiens
gggggaagaaaaggugggg

SEQ ID NO: 2327 - RNA, 19 nt, Homo sapiens
ccccaccuuuucuuccccc

SEQ ID NO: 2328 - RNA, 18 nt, Homo sapiens
cauucaacuagugauugu

SEQ ID NO: 2329 - RNA, 18 nt, Homo sapiens
acaaucacuaguugaaug

SEQ ID NO: 2330 - RNA, 18 nt, Homo sapiens
cagcagucccucccccug

SEQ ID NO: 2331 - RNA, 18 nt, Homo sapiens
cagggggagggacugcug

SEQ ID NO: 2332 - RNA, 17 nt, Homo sapiens
ccaauuaccacuucuuu

SEQ ID NO: 2333 - RNA, 17 nt, Homo sapiens
aaagaagugguaauugg

SEQ ID NO: 2334 - RNA, 17 nt, Homo sapiens
cucagugacucaugugc

SEQ ID NO: 2335 - RNA, 17 nt, Homo sapiens
gcacaugagucacugag

SEQ ID NO: 2336 - RNA, 21 nt, Homo sapiens
gcaguucugagcacaguacac

SEQ ID NO: 2337 - RNA, 21 nt, Homo sapiens
guguacugugcucagaacugc

SEQ ID NO: 2338 - RNA, 18 nt, Homo sapiens
cuaggggguuugcccuug

SEQ ID NO: 2339 - RNA, 18 nt, Homo sapiens
caagggcaaacccccuag

SEQ ID NO: 2340 - RNA, 16 nt, Homo sapiens
cucuccucccggcuuc

SEQ ID NO: 2341 - RNA, 16 nt, Homo sapiens
gaagccgggaggagag

SEQ ID NO: 2342 - RNA, 21 nt, Homo sapiens
gaguguaguucugagcagagc

SEQ ID NO: 2343 - RNA, 21 nt, Homo sapiens
gcucugcucagaacuacacuc

SEQ ID NO: 2344 - RNA, 18 nt, Homo sapiens
gggucccggggagggggg

SEQ ID NO: 2345 - RNA, 18 nt, Homo sapiens
ccccccuccccgggaccc

SEQ ID NO: 2346 - RNA, 18 nt, Homo sapiens
uaaaauuugcauccagga

SEQ ID NO: 2347 - RNA, 18 nt, Homo sapiens
uccuggaugcaaauuuua

SEQ ID NO: 2348 - RNA, 17 nt, Homo sapiens
uggggcucagcgaguuu

SEQ ID NO: 2349 - RNA, 17 nt, Homo sapiens
aaacucgcugagcccca

SEQ ID NO: 2350 - RNA, 18 nt, Homo sapiens
gggcucacaucaccccau

SEQ ID NO: 2351 - RNA, 18 nt, Homo sapiens
auggggugaugugagccc

SEQ ID NO: 2352 - RNA, 18 nt, Homo sapiens
gcggcgaguccgacucau

SEQ ID NO: 2353 - RNA, 18 nt, Homo sapiens
augagucggacucgccgc

SEQ ID NO: 2354 - RNA, 17 nt, Homo sapiens
accccacuccugguacc

SEQ ID NO: 2355 - RNA, 17 nt, Homo sapiens
gguaccaggaguggggu

SEQ ID NO: 2356 - RNA, 19 nt, Homo sapiens
ucucccuugagggcacuuu

SEQ ID NO: 2357 - RNA, 19 nt, Homo sapiens
aaagugcccucaagggaga

SEQ ID NO: 2358 - RNA, 17 nt, Homo sapiens
uugucugcugaguuucc

SEQ ID NO: 2359 - RNA, 17 nt, Homo sapiens
ggaaacucagcagacaa

SEQ ID NO: 2360 - RNA, 19 nt, Homo sapiens
gcauugugcagggcuauca

SEQ ID NO: 2361 - RNA, 19 nt, Homo sapiens
ugauagcccugcacaaugc

SEQ ID NO: 2362 - RNA, 19 nt, Homo sapiens
ugcccuccuuucuucccuc

SEQ ID NO: 2363 - RNA, 19 nt, Homo sapiens
gagggaagaaaggagggca

SEQ ID NO: 2364 - RNA, 16 nt, Homo sapiens
uucagcaggaacagcu

SEQ ID NO: 2365 - RNA, 16 nt, Homo sapiens
agcuguuccugcugaa

SEQ ID NO: 2366 - RNA, 18 nt, Homo sapiens
ccccugggccggccuugg

SEQ ID NO: 2367 - RNA, 18 nt, Homo sapiens
ccaaggccggcccagggg

SEQ ID NO: 2368 - RNA, 17 nt, Homo sapiens
cagccugacaggaacag

SEQ ID NO: 2369 - RNA, 17 nt, Homo sapiens
cuguuccugucaggcug

SEQ ID NO: 2370 - RNA, 17 nt, Homo sapiens
gggagucuacagcaggg

SEQ ID NO: 2371 - RNA, 17 nt, Homo sapiens
cccugcuguagacuccc

SEQ ID NO: 2372 - RNA, 18 nt, Homo sapiens
cagugcaauguuuuccuu

SEQ ID NO: 2373 - RNA, 18 nt, Homo sapiens
aaggaaaacauugcacug

SEQ ID NO: 2374 - RNA, 17 nt, Homo sapiens
augugggcucaggcuca

SEQ ID NO: 2375 - RNA, 17 nt, Homo sapiens
ugagccugagcccacau

SEQ ID NO: 2376 - RNA, 16 nt, Homo sapiens
ugccuuccugucugug

SEQ ID NO: 2377 - RNA, 16 nt, Homo sapiens
cacagacaggaaggca

SEQ ID NO: 2378 - RNA, 22 nt, Homo sapiens
cugggacaggaggaggaggcag

SEQ ID NO: 2379 - RNA, 22 nt, Homo sapiens
cugccuccuccuccugucccag

SEQ ID NO: 2380 - RNA, 18 nt, Homo sapiens
gcuggugacaugagaggc

SEQ ID NO: 2381 - RNA, 18 nt, Homo sapiens
gccucucaugucaccagc

SEQ ID NO: 2382 - RNA, 18 nt, Homo sapiens
ugggagcuggacuacuuc

SEQ ID NO: 2383 - RNA, 18 nt, Homo sapiens
gaaguaguccagcuccca

SEQ ID NO: 2384 - RNA, 20 nt, Homo sapiens
ucccacuacuucacuuguga

SEQ ID NO: 2385 - RNA, 20 nt, Homo sapiens
ucacaagugaaguaguggga

SEQ ID NO: 2386 - RNA, 18 nt, Homo sapiens
ccaguguggcucagcgag

SEQ ID NO: 2387 - RNA, 18 nt, Homo sapiens
cucgcugagccacacugg

SEQ ID NO: 2388 - RNA, 17 nt, Homo sapiens
uucugagcugaggacag

SEQ ID NO: 2389 - RNA, 17 nt, Homo sapiens
cuguccucagcucagaa

SEQ ID NO: 2390 - RNA, 17 nt, Homo sapiens
ccggcauguccagggca

SEQ ID NO: 2391 - RNA, 17 nt, Homo sapiens
ugcccuggacaugccgg

SEQ ID NO: 2392 - RNA, 18 nt, Homo sapiens
ccuagacaccuccaguuc

SEQ ID NO: 2393 - RNA, 18 nt, Homo sapiens
gaacuggaggugucuagg

SEQ ID NO: 2394 - RNA, 17 nt, Homo sapiens
uggagagaaaggcagua

SEQ ID NO: 2395 - RNA, 17 nt, Homo sapiens
uacugccuuucucucca

SEQ ID NO: 2396 - RNA, 19 nt, Homo sapiens
aauguuuuuuccuguuucc

SEQ ID NO: 2397 - RNA, 19 nt, Homo sapiens
ggaaacaggaaaaaacauu

SEQ ID NO: 2398 - RNA, 18 nt, Homo sapiens
ucccuggaguuucuucuu

SEQ ID NO: 2399 - RNA, 18 nt, Homo sapiens
aagaagaaacuccaggga

SEQ ID NO: 2400 - RNA, 18 nt, Homo sapiens
cuggagucuaggauucca

SEQ ID NO: 2401 - RNA, 18 nt, Homo sapiens
uggaauccuagacuccag

SEQ ID NO: 2402 - RNA, 16 nt, Homo sapiens
gcagcauucauguccc

SEQ ID NO: 2403 - RNA, 16 nt, Homo sapiens
gggacaugaaugcugc

SEQ ID NO: 2404 - RNA, 18 nt, Homo sapiens
gaaagagagcugagugug

SEQ ID NO: 2405 - RNA, 18 nt, Homo sapiens
cacacucagcucucuuuc

SEQ ID NO: 2406 - RNA, 19 nt, Homo sapiens
ggccuuguuccugucccca

SEQ ID NO: 2407 - RNA, 19 nt, Homo sapiens
uggggacaggaacaaggcc

SEQ ID NO: 2408 - RNA, 20 nt, Homo sapiens
agcccccuggccccaaaccc

SEQ ID NO: 2409 - RNA, 20 nt, Homo sapiens
ggguuuggggccagggggcu

SEQ ID NO: 2410 - RNA, 18 nt, Homo sapiens
cucugggaaaugggacag

SEQ ID NO: 2411 - RNA, 18 nt, Homo sapiens
cugucccauuucccagag

SEQ ID NO: 2412 - RNA, 18 nt, Homo sapiens
ccgcuuucugagcuggac

SEQ ID NO: 2413 - RNA, 18 nt, Homo sapiens
guccagcucagaaagcgg

SEQ ID NO: 2414 - RNA, 17 nt, Homo sapiens
ggugaggcuagcuggug

SEQ ID NO: 2415 - RNA, 17 nt, Homo sapiens
caccagcuagccucacc

SEQ ID NO: 2416 - RNA, 17 nt, Homo sapiens
acauugccagggaguuu

SEQ ID NO: 2417 - RNA, 17 nt, Homo sapiens
aaacucccuggcaaugu

SEQ ID NO: 2418 - RNA, 17 nt, Homo sapiens
cacuguggguacaugcu

SEQ ID NO: 2419 - RNA, 17 nt, Homo sapiens
agcauguacccacagug

SEQ ID NO: 2420 - RNA, 17 nt, Homo sapiens
ucccugagcaaagccac

SEQ ID NO: 2421 - RNA, 17 nt, Homo sapiens
guggcuuugcucaggga

SEQ ID NO: 2422 - RNA, 18 nt, Homo sapiens
gggauucuguagcuuccu

SEQ ID NO: 2423 - RNA, 18 nt, Homo sapiens
aggaagcuacagaauccc

SEQ ID NO: 2424 - RNA, 21 nt, Homo sapiens
uuagcgguggaccgcccugcg

SEQ ID NO: 2425 - RNA, 21 nt, Homo sapiens
cgcagggcgguccaccgcuaa

SEQ ID NO: 2426 - RNA, 21 nt, Homo sapiens
cugugggcucagcgcgugggg

SEQ ID NO: 2427 - RNA, 21 nt, Homo sapiens
ccccacgcgcugagcccacag

SEQ ID NO: 2428 - RNA, 18 nt, Homo sapiens
cagccccacagccucaga

SEQ ID NO: 2429 - RNA, 18 nt, Homo sapiens
ucugaggcuguggggcug

SEQ ID NO: 2430 - RNA, 20 nt, Homo sapiens
cccugagacccuaaccuuaa

SEQ ID NO: 2431 - RNA, 20 nt, Homo sapiens
uuaagguuagggucucaggg

SEQ ID NO: 2432 - RNA, 18 nt, Homo sapiens
uugcacuugucucaguga

SEQ ID NO: 2433 - RNA, 18 nt, Homo sapiens
ucacugagacaagugcaa

SEQ ID NO: 2434 - RNA, 20 nt, Homo sapiens
uguuccucugucucccagac

SEQ ID NO: 2435 - RNA, 20 nt, Homo sapiens
gucugggagacagaggaaca

SEQ ID NO: 2436 - RNA, 19 nt, Homo sapiens
ggcuugcaugggggacugg

SEQ ID NO: 2437 - RNA, 19 nt, Homo sapiens
ccagucccccaugcaagcc

SEQ ID NO: 2438 - RNA, 17 nt, Homo sapiens
ccaguuuucccaggauu

SEQ ID NO: 2439 - RNA, 17 nt, Homo sapiens
aauccugggaaaacugg

SEQ ID NO: 2440 - RNA, 19 nt, Homo sapiens
ccugagacccuaguuccac

SEQ ID NO: 2441 - RNA, 19 nt, Homo sapiens
guggaacuagggucucagg

SEQ ID NO: 2442 - RNA, 19 nt, Homo sapiens
ccucagaucagagccuugc

SEQ ID NO: 2443 - RNA, 19 nt, Homo sapiens
gcaaggcucugaucugagg

SEQ ID NO: 2444 - RNA, 22 nt, Homo sapiens
cauugcacuugucucggucuga

SEQ ID NO: 2445 - RNA, 22 nt, Homo sapiens
ucagaccgagacaagugcaaug

SEQ ID NO: 2446 - RNA, 21 nt, Homo sapiens
aggcggagacuugggcaauug

SEQ ID NO: 2447 - RNA, 21 nt, Homo sapiens
caauugcccaagucuccgccu

SEQ ID NO: 2448 - RNA, 22 nt, Homo sapiens
ccuauucuugguuacuugcacg

SEQ ID NO: 2449 - RNA, 22 nt, Homo sapiens
cgugcaaguaaccaagaauagg

SEQ ID NO: 2450 - RNA, 19 nt, Homo sapiens
aauggauuuuuggagcagg

SEQ ID NO: 2451 - RNA, 19 nt, Homo sapiens
ccugcuccaaaaauccauu

SEQ ID NO: 2452 - RNA, 22 nt, Homo sapiens
ugcggggcuagggcuaacagca

SEQ ID NO: 2453 - RNA, 22 nt, Homo sapiens
ugcuguuagcccuagccccgca

SEQ ID NO: 2454 - RNA, 22 nt, Homo sapiens
aaaaguaauugcggauuuugcc

SEQ ID NO: 2455 - RNA, 22 nt, Homo sapiens
ggcaaaauccgcaauuacuuuu

SEQ ID NO: 2456 - RNA, 22 nt, Homo sapiens
caaaaguaauuguggauuuugu

SEQ ID NO: 2457 - RNA, 22 nt, Homo sapiens
acaaaauccacaauuacuuuug

SEQ ID NO: 2458 - RNA, 23 nt, Homo sapiens
uaagugcuuccauguuuugguga

SEQ ID NO: 2459 - RNA, 23 nt, Homo sapiens
ucaccaaaacauggaagcacuua

SEQ ID NO: 2460 - RNA, 23 nt, Homo sapiens
acuuaaacguggauguacuugcu

SEQ ID NO: 2461 - RNA, 23 nt, Homo sapiens
agcaaguacauccacguuuaagu

SEQ ID NO: 2462 - RNA, 21 nt, Homo sapiens
cuauacaaucuacugucuuuc

SEQ ID NO: 2463 - RNA, 21 nt, Homo sapiens
gaaagacaguagauuguauag

SEQ ID NO: 2464 - RNA, 22 nt, Homo sapiens
ugagguaguagguuguauaguu

SEQ ID NO: 2465 - RNA, 22 nt, Homo sapiens
aacuauacaaccuacuaccuca

SEQ ID NO: 2466 - RNA, 22 nt, Homo sapiens
cuguacagccuccuagcuuucc

SEQ ID NO: 2467 - RNA, 22 nt, Homo sapiens
ggaaagcuaggaggcuguacag

SEQ ID NO: 2468 - RNA, 20 nt, Homo sapiens
caccaggcauuguggucucc

SEQ ID NO: 2469 - RNA, 20 nt, Homo sapiens
ggagaccacaaugccuggug

SEQ ID NO: 2470 - RNA, 23 nt, Homo sapiens
ugaguaccgccaugucuguuggg

SEQ ID NO: 2471 - RNA, 23 nt, Homo sapiens
cccaacagacauggcgguacuca

SEQ ID NO: 2472 - RNA, 22 nt, Homo sapiens
uacccagagcaugcagugugaa

SEQ ID NO: 2473 - RNA, 22 nt, Homo sapiens
uucacacugcaugcucugggua

SEQ ID NO: 2474 - RNA, 22 nt, Homo sapiens
aagugcugucauagcugagguc

SEQ ID NO: 2475 - RNA, 22 nt, Homo sapiens
gaccucagcuaugacagcacuu

SEQ ID NO: 2476 - RNA, 23 nt, Homo sapiens
cacucagccuugagggcacuuuc

SEQ ID NO: 2477 - RNA, 23 nt, Homo sapiens
gaaagugcccucaaggcugagug

SEQ ID NO: 2478 - RNA, 22 nt, Homo sapiens
ucgacagcacgacacugccuuc

SEQ ID NO: 2479 - RNA, 22 nt, Homo sapiens
gaaggcagugucgugcugucga

SEQ ID NO: 2480 - RNA, 22 nt, Homo sapiens
uagguaguuuccuguuguuggg

SEQ ID NO: 2481 - RNA, 22 nt, Homo sapiens
cccaacaacaggaaacuaccua

SEQ ID NO: 2482 - RNA, 21 nt, Homo sapiens
uacaguacugugauaacugaa

SEQ ID NO: 2483 - RNA, 21 nt, Homo sapiens
uucaguuaucacaguacugua

SEQ ID NO: 2484 - RNA, 22 nt, Homo sapiens
caguuaucacagugcugaugcu

SEQ ID NO: 2485 - RNA, 22 nt, Homo sapiens
agcaucagcacugugauaacug

SEQ ID NO: 2486 - RNA, 23 nt, Homo sapiens
ugugcaaaucuaugcaaaacuga

SEQ ID NO: 2487 - RNA, 23 nt, Homo sapiens
ucaguuuugcauagauuugcaca

SEQ ID NO: 2488 - RNA, 22 nt, Homo sapiens
aguuuugcauaguugcacuaca

SEQ ID NO: 2489 - RNA, 22 nt, Homo sapiens
uguagugcaacuaugcaaaacu

SEQ ID NO: 2490 - RNA, 23 nt, Homo sapiens
aguuuugcagguuugcauccagc

SEQ ID NO: 2491 - RNA, 23 nt, Homo sapiens
gcuggaugcaaaccugcaaaacu

SEQ ID NO: 2492 - RNA, 22 nt, Homo sapiens
aguuuugcagguuugcauuuca

SEQ ID NO: 2493 - RNA, 22 nt, Homo sapiens
ugaaaugcaaaccugcaaaacu

SEQ ID NO: 2494 - RNA, 23 nt, Homo sapiens
ugugcaaauccaugcaaaacuga

SEQ ID NO: 2495 - RNA, 23 nt, Homo sapiens
ucaguuuugcauggauuugcaca

SEQ ID NO: 2496 - RNA, 23 nt, Homo sapiens
uacugcaucaggaacugauugga

SEQ ID NO: 2497 - RNA, 23 nt, Homo sapiens
uccaaucaguuccugaugcagua

SEQ ID NO: 2498 - RNA, 22 nt, Homo sapiens
augguuccgucaagcaccaugg

SEQ ID NO: 2499 - RNA, 22 nt, Homo sapiens
ccauggugcuugacggaaccau

SEQ ID NO: 2500 - RNA, 21 nt, Homo sapiens
agcuacaucuggcuacugggu

SEQ ID NO: 2501 - RNA, 21 nt, Homo sapiens
acccaguagccagauguagcu

SEQ ID NO: 2502 - RNA, 22 nt, Homo sapiens
cucaguagccaguguagauccu

SEQ ID NO: 2503 - RNA, 22 nt, Homo sapiens
aggaucuacacuggcuacugag

SEQ ID NO: 2504 - RNA, 22 nt, Homo sapiens
uuaucagaaucuccagggguac

SEQ ID NO: 2505 - RNA, 22 nt, Homo sapiens
guaccccuggagauucugauaa

SEQ ID NO: 2506 - RNA, 23 nt, Homo sapiens
aucaacagacauuaauugggcgc

SEQ ID NO: 2507 - RNA, 23 nt, Homo sapiens
gcgcccaauuaaugucuguugau

SEQ ID NO: 2508 - RNA, 21 nt, Homo sapiens
caaaacgugaggcgcugcuau

SEQ ID NO: 2509 - RNA, 21 nt, Homo sapiens
auagcagcgccucacguuuug

SEQ ID NO: 2510 - RNA, 22 nt, Homo sapiens
cagcagcaauucauguuuugaa

SEQ ID NO: 2511 - RNA, 22 nt, Homo sapiens
uucaaaacaugaauugcugcug

SEQ ID NO: 2512 - RNA, 18 nt, Homo sapiens
uucacagggaggugucau

SEQ ID NO: 2513 - RNA, 18 nt, Homo sapiens
augacaccucccugugaa

SEQ ID NO: 2514 - RNA, 20 nt, Homo sapiens
gcggagagagaauggggagc

SEQ ID NO: 2515 - RNA, 20 nt, Homo sapiens
gcuccccauucucucuccgc

SEQ ID NO: 2516 - RNA, 21 nt, Homo sapiens
ccugcgagucuccggcggugg

SEQ ID NO: 2517 - RNA, 21 nt, Homo sapiens
ccaccgccggagacucgcagg

SEQ ID NO: 2518 - RNA, 21 nt, Homo sapiens
gggcuagggccugcugccccc

SEQ ID NO: 2519 - RNA, 21 nt, Homo sapiens
gggggcagcaggcccuagccc

SEQ ID NO: 2520 - RNA, 19 nt, Homo sapiens
uucugcugccggccaaggc

SEQ ID NO: 2521 - RNA, 19 nt, Homo sapiens
gccuuggccggcagcagaa

SEQ ID NO: 2522 - RNA, 22 nt, Homo sapiens
uccucaucacacugcaccuuag

SEQ ID NO: 2523 - RNA, 22 nt, Homo sapiens
cuaaggugcagugugaugagga

SEQ ID NO: 2524 - RNA, 20 nt, Homo sapiens
gguagugaguuaucagcuac

SEQ ID NO: 2525 - RNA, 20 nt, Homo sapiens
guagcugauaacucacuacc

SEQ ID NO: 2526 - RNA, 20 nt, Homo sapiens
gauauucagaggcuaggugg

SEQ ID NO: 2527 - RNA, 20 nt, Homo sapiens
ccaccuagccucugaauauc

SEQ ID NO: 2528 - RNA, 21 nt, Homo sapiens
acggcccaggcggcauuggug

SEQ ID NO: 2529 - RNA, 21 nt, Homo sapiens
caccaaugccgccugggccgu

SEQ ID NO: 2530 - RNA, 21 nt, Homo sapiens
agcaugacagaggagaggugg

SEQ ID NO: 2531 - RNA, 21 nt, Homo sapiens
ccaccucuccucugucaugcu

SEQ ID NO: 2532 - RNA, 21 nt, Homo sapiens
gggaagagcuguacggccuuc

SEQ ID NO: 2533 - RNA, 21 nt, Homo sapiens
gaaggccguacagcucuuccc

SEQ ID NO: 2534 - RNA, 19 nt, Homo sapiens
ccgccugagcuagcugugg

SEQ ID NO: 2535 - RNA, 19 nt, Homo sapiens
ccacagcuagcucaggcgg

SEQ ID NO: 2536 - RNA, 24 nt, Homo sapiens
uuggaagcuuggaccaacuagcug

SEQ ID NO: 2537 - RNA, 24 nt, Homo sapiens
cagcuaguugguccaagcuuccaa

SEQ ID NO: 2538 - RNA, 19 nt, Homo sapiens
ucuagugcgggcguucccg

SEQ ID NO: 2539 - RNA, 19 nt, Homo sapiens
cgggaacgcccgcacuaga

SEQ ID NO: 2540 - RNA, 24 nt, Homo sapiens
aggagcagugccggccaaggcgcc

SEQ ID NO: 2541 - RNA, 24 nt, Homo sapiens
ggcgccuuggccggcacugcuccu

SEQ ID NO: 2542 - RNA, 19 nt, Homo sapiens
gaauacgucugguugaucc

SEQ ID NO: 2543 - RNA, 19 nt, Homo sapiens
ggaucaaccagacguauuc

SEQ ID NO: 2544 - RNA, 20 nt, Homo sapiens
cuuauaucagaggcuguggg

SEQ ID NO: 2545 - RNA, 20 nt, Homo sapiens
cccacagccucugauauaag

SEQ ID NO: 2546 - RNA, 20 nt, Homo sapiens
uuccgccagucgguggccgg

SEQ ID NO: 2547 - RNA, 20 nt, Homo sapiens
ccggccaccgacuggcggaa

SEQ ID NO: 2548 - RNA, 19 nt, Homo sapiens
aaggggcugggggagcaca

SEQ ID NO: 2549 - RNA, 19 nt, Homo sapiens
ugugcucccccagccccuu

SEQ ID NO: 2550 - RNA, 23 nt, Homo sapiens
agguugggaucgguugcaaugcu

SEQ ID NO: 2551 - RNA, 23 nt, Homo sapiens
agcauugcaaccgaucccaaccu

SEQ ID NO: 2552 - RNA, 22 nt, Homo sapiens
ggguggggauuuguugcauuac

SEQ ID NO: 2553 - RNA, 22 nt, Homo sapiens
guaaugcaacaaauccccaccc

SEQ ID NO: 2554 - RNA, 22 nt, Homo sapiens
uauugcacuugucccggccugu

SEQ ID NO: 2555 - RNA, 22 nt, Homo sapiens
acaggccgggacaagugcaaua

SEQ ID NO: 2556 - RNA, 22 nt, Homo sapiens
uauugcacucgucccggccucc

SEQ ID NO: 2557 - RNA, 22 nt, Homo sapiens
ggaggccgggacgagugcaaua

SEQ ID NO: 2558 - RNA, 22 nt, Homo sapiens
agggacgggacgcggugcagug

SEQ ID NO: 2559 - RNA, 22 nt, Homo sapiens
cacugcaccgcgucccgucccu

SEQ ID NO: 2560 - RNA, 21 nt, Homo sapiens
aucacauugccagggauuucc

SEQ ID NO: 2561 - RNA, 21 nt, Homo sapiens
ggaaaucccuggcaaugugau

SEQ ID NO: 2562 - RNA, 22 nt, Homo sapiens
gggguuccuggggaugggauuu

SEQ ID NO: 2563 - RNA, 22 nt, Homo sapiens
aaaucccauccccaggaacccc

SEQ ID NO: 2564 - RNA, 22 nt, Homo sapiens
acugcagugaaggcacuuguag

SEQ ID NO: 2565 - RNA, 22 nt, Homo sapiens
cuacaagugccuucacugcagu

SEQ ID NO: 2566 - RNA, 23 nt, Homo sapiens
agcuacauugucugcuggguuuc

SEQ ID NO: 2567 - RNA, 23 nt, Homo sapiens
gaaacccagcagacaauguagcu

SEQ ID NO: 2568 - RNA, 22 nt, Homo sapiens
accuggcauacaauguagauuu

SEQ ID NO: 2569 - RNA, 22 nt, Homo sapiens
aaaucuacauuguaugccaggu

SEQ ID NO: 2570 - RNA, 22 nt, Homo sapiens
ucguaccgugaguaauaaugcg

SEQ ID NO: 2571 - RNA, 22 nt, Homo sapiens
cgcauuauuacucacgguacga

SEQ ID NO: 2572 - RNA, 21 nt, Homo sapiens
cauuauuacuuuugguacgcg

SEQ ID NO: 2573 - RNA, 21 nt, Homo sapiens
cgcguaccaaaaguaauaaug

SEQ ID NO: 2574 - RNA, 23 nt, Homo sapiens
uacuccagagggcgucacucaug

SEQ ID NO: 2575 - RNA, 23 nt, Homo sapiens
caugagugacgcccucuggagua

SEQ ID NO: 2576 - RNA, 21 nt, Homo sapiens
ucccacguuguggcccagcag

SEQ ID NO: 2577 - RNA, 21 nt, Homo sapiens
cugcugggccacaacguggga

SEQ ID NO: 2578 - RNA, 23 nt, Homo sapiens
ccucaccaccccuucugccugca

SEQ ID NO: 2579 - RNA, 23 nt, Homo sapiens
ugcaggcagaagggguggugagg

SEQ ID NO: 2580 - RNA, 24 nt, Homo sapiens
cugcaggcagaaguggggcugaca

SEQ ID NO: 2581 - RNA, 24 nt, Homo sapiens
ugucagccccacuucugccugcag

SEQ ID NO: 2582 - RNA, 21 nt, Homo sapiens
ccaaaccagucgugccugugg

SEQ ID NO: 2583 - RNA, 21 nt, Homo sapiens
ccacaggcacgacugguuugg

SEQ ID NO: 2584 - RNA, 22 nt, Homo sapiens
cucaaaccggcugugccugugg

SEQ ID NO: 2585 - RNA, 22 nt, Homo sapiens
ccacaggcacagccgguuugag

SEQ ID NO: 2586 - RNA, 21 nt, Homo sapiens
acaggcacgacugguuuggca

SEQ ID NO: 2587 - RNA, 21 nt, Homo sapiens
ugccaaaccagucgugccugu

SEQ ID NO: 2588 - RNA, 22 nt, Homo sapiens
uccgaacucuccauuccucugc

SEQ ID NO: 2589 - RNA, 22 nt, Homo sapiens
gcagaggaauggagaguucgga

SEQ ID NO: 2590 - RNA, 20 nt, Homo sapiens
ugggaauggggguaagggcc

SEQ ID NO: 2591 - RNA, 20 nt, Homo sapiens
ggcccuuacccccauuccca

SEQ ID NO: 2592 - RNA, 22 nt, Homo sapiens
aggcgauguggggauguagaga

SEQ ID NO: 2593 - RNA, 22 nt, Homo sapiens
ucucuacauccccacaucgccu

SEQ ID NO: 2594 - RNA, 21 nt, Homo sapiens
uaguggucagagggcuuauga

SEQ ID NO: 2595 - RNA, 21 nt, Homo sapiens
ucauaagcccucugaccacua

SEQ ID NO: 2596 - RNA, 22 nt, Homo sapiens
ucugacaucagugauucuccug

SEQ ID NO: 2597 - RNA, 22 nt, Homo sapiens
caggagaaucacugaugucaga

SEQ ID NO: 2598 - RNA, 22 nt, Homo sapiens
cgcgccugcaggaacugguaga

SEQ ID NO: 2599 - RNA, 22 nt, Homo sapiens
ucuaccaguuccugcaggcgcg

SEQ ID NO: 2600 - RNA, 23 nt, Homo sapiens
ugggcaggggcuuauuguaggag

SEQ ID NO: 2601 - RNA, 23 nt, Homo sapiens
cuccuacaauaagccccugccca

SEQ ID NO: 2602 - RNA, 22 nt, Homo sapiens
ugcaggggucgggugggccagg

SEQ ID NO: 2603 - RNA, 22 nt, Homo sapiens
ccuggcccacccgaccccugca

SEQ ID NO: 2604 - RNA, 20 nt, Homo sapiens
aggcgcacccgaccacaugc

SEQ ID NO: 2605 - RNA, 20 nt, Homo sapiens
gcauguggucgggugcgccu

SEQ ID NO: 2606 - RNA, 22 nt, Homo sapiens
auaguccgaguaacgucggggc

SEQ ID NO: 2607 - RNA, 22 nt, Homo sapiens
gccccgacguuacucggacuau

SEQ ID NO: 2608 - RNA, 23 nt, Homo sapiens
cugggcccgcggcgggcgugggg

SEQ ID NO: 2609 - RNA, 23 nt, Homo sapiens
ccccacgcccgccgcgggcccag

SEQ ID NO: 2610 - RNA, 21 nt, Homo sapiens
uacuuggaaaggcaucaguug

SEQ ID NO: 2611 - RNA, 21 nt, Homo sapiens
caacugaugccuuuccaagua

SEQ ID NO: 2612 - RNA, 22 nt, Homo sapiens
ugcaacgaaccugagccacuga

SEQ ID NO: 2613 - RNA, 22 nt, Homo sapiens
ucaguggcucagguucguugca

SEQ ID NO: 2614 - RNA, 22 nt, Homo sapiens
ugcaacuuaccugagucauuga

SEQ ID NO: 2615 - RNA, 22 nt, Homo sapiens
ucaaugacucagguaaguugca

SEQ ID NO: 2616 - RNA, 21 nt, Homo sapiens
cacuguguccuuucugcguag

SEQ ID NO: 2617 - RNA, 21 nt, Homo sapiens
cuacgcagaaaggacacagug

SEQ ID NO: 2618 - RNA, 22 nt, Homo sapiens
cacuggcuccuuucuggguaga

SEQ ID NO: 2619 - RNA, 22 nt, Homo sapiens
ucuacccagaaaggagccagug

SEQ ID NO: 2620 - RNA, 22 nt, Homo sapiens
cacuguuuccuuucugagugga

SEQ ID NO: 2621 - RNA, 22 nt, Homo sapiens
uccacucagaaaggaaacagug

SEQ ID NO: 2622 - RNA, 21 nt, Homo sapiens
uauucagaaaggugccaguca

SEQ ID NO: 2623 - RNA, 21 nt, Homo sapiens
ugacuggcaccuuucugaaua

SEQ ID NO: 2624 - RNA, 20 nt, Homo sapiens
auuccuagaaauuguucaua

SEQ ID NO: 2625 - RNA, 20 nt, Homo sapiens
uaugaacaauuucuaggaau

SEQ ID NO: 2626 - RNA, 22 nt, Homo sapiens
uaauacugucugguaaaaccgu

SEQ ID NO: 2627 - RNA, 22 nt, Homo sapiens
acgguuuuaccagacaguauua

SEQ ID NO: 2628 - RNA, 22 nt, Homo sapiens
ugaaacauacacgggaaaccuc

SEQ ID NO: 2629 - RNA, 22 nt, Homo sapiens
gagguuucccguguauguuuca

SEQ ID NO: 2630 - RNA, 22 nt, Homo sapiens
cuauacaaccuacugccuuccc

SEQ ID NO: 2631 - RNA, 22 nt, Homo sapiens
gggaaggcaguagguuguauag

SEQ ID NO: 2632 - RNA, 22 nt, Homo sapiens
ugagguaguagguugugugguu

SEQ ID NO: 2633 - RNA, 22 nt, Homo sapiens
aaccacacaaccuacuaccuca

SEQ ID NO: 2634 - RNA, 22 nt, Homo sapiens
uaacacugucugguaacgaugu

SEQ ID NO: 2635 - RNA, 22 nt, Homo sapiens
acaucguuaccagacaguguua

SEQ ID NO: 2636 - RNA, 22 nt, Homo sapiens
caucuuaccggacagugcugga

SEQ ID NO: 2637 - RNA, 22 nt, Homo sapiens
uccagcacuguccgguaagaug

SEQ ID NO: 2638 - RNA, 22 nt, Homo sapiens
uaauacugccugguaaugauga

SEQ ID NO: 2639 - RNA, 22 nt, Homo sapiens
ucaucauuaccaggcaguauua

SEQ ID NO: 2640 - RNA, 22 nt, Homo sapiens
caucuuacugggcagcauugga

SEQ ID NO: 2641 - RNA, 22 nt, Homo sapiens
uccaaugcugcccaguaagaug

SEQ ID NO: 2642 - RNA, 23 nt, Homo sapiens
uaauacugccggguaaugaugga

SEQ ID NO: 2643 - RNA, 23 nt, Homo sapiens
uccaucauuacccggcaguauua

SEQ ID NO: 2644 - RNA, 22 nt, Homo sapiens
cgucuuacccagcaguguuugg

SEQ ID NO: 2645 - RNA, 22 nt, Homo sapiens
ccaaacacugcuggguaagacg

SEQ ID NO: 2646 - RNA, 22 nt, Homo sapiens
uccagcaucagugauuuuguug

SEQ ID NO: 2647 - RNA, 22 nt, Homo sapiens
caacaaaaucacugaugcugga

SEQ ID NO: 2648 - RNA, 20 nt, Homo sapiens
uacaguauagaugauguacu

SEQ ID NO: 2649 - RNA, 20 nt, Homo sapiens
aguacaucaucuauacugua

SEQ ID NO: 2650 - RNA, 22 nt, Homo sapiens
ggauaucaucauauacuguaag

SEQ ID NO: 2651 - RNA, 22 nt, Homo sapiens
cuuacaguauaugaugauaucc

SEQ ID NO: 2652 - RNA, 21 nt, Homo sapiens
cggggcagcucaguacaggau

SEQ ID NO: 2653 - RNA, 21 nt, Homo sapiens
auccuguacugagcugccccg

SEQ ID NO: 2654 - RNA, 21 nt, Homo sapiens
uccuucugcuccgucccccag

SEQ ID NO: 2655 - RNA, 21 nt, Homo sapiens
cugggggacggagcagaagga

SEQ ID NO: 2656 - RNA, 21 nt, Homo sapiens
cgggggcggggccgaagcgcg

SEQ ID NO: 2657 - RNA, 21 nt, Homo sapiens
cgcgcuucggccccgcccccg

SEQ ID NO: 2658 - RNA, 21 nt, Homo sapiens
uccugcgcgucccagaugccc

SEQ ID NO: 2659 - RNA, 21 nt, Homo sapiens
gggcaucugggacgcgcagga

SEQ ID NO: 2660 - RNA, 22 nt, Homo sapiens
caucagaauucauggaggcuag

SEQ ID NO: 2661 - RNA, 22 nt, Homo sapiens
cuagccuccaugaauucugaug

SEQ ID NO: 2662 - RNA, 22 nt, Homo sapiens
agcuuccaugacuccugaugga

SEQ ID NO: 2663 - RNA, 22 nt, Homo sapiens
uccaucaggagucauggaagcu

SEQ ID NO: 2664 - RNA, 21 nt, Homo sapiens
ugacagcgcccugccuggcuc

SEQ ID NO: 2665 - RNA, 21 nt, Homo sapiens
gagccaggcagggcgcuguca

SEQ ID NO: 2666 - RNA, 24 nt, Homo sapiens
agcgcgggcugagcgcugccaguc

SEQ ID NO: 2667 - RNA, 24 nt, Homo sapiens
gacuggcagcgcucagcccgcgcu

SEQ ID NO: 2668 - RNA, 22 nt, Homo sapiens
cugggaggugugauaucguggu

SEQ ID NO: 2669 - RNA, 22 nt, Homo sapiens
accacgauaucacaccucccag

SEQ ID NO: 2670 - RNA, 22 nt, Homo sapiens
ugugauaucaugguuccuggga

SEQ ID NO: 2671 - RNA, 22 nt, Homo sapiens
ucccaggaaccaugauaucaca

SEQ ID NO: 2672 - RNA, 22 nt, Homo sapiens
aggugcuccaggcuggcucaca

SEQ ID NO: 2673 - RNA, 22 nt, Homo sapiens
ugugagccagccuggagcaccu

SEQ ID NO: 2674 - RNA, 22 nt, Homo sapiens
gagcaauguagguagacuguuu

SEQ ID NO: 2675 - RNA, 22 nt, Homo sapiens
aaacagucuaccuacauugcuc

SEQ ID NO: 2676 - RNA, 22 nt, Homo sapiens
uguccucuagggccugcagucu

SEQ ID NO: 2677 - RNA, 22 nt, Homo sapiens
agacugcaggcccuagaggaca

SEQ ID NO: 2678 - RNA, 20 nt, Homo sapiens
aaaggcauaaaaccaagaca

SEQ ID NO: 2679 - RNA, 20 nt, Homo sapiens
ugucuugguuuuaugccuuu

SEQ ID NO: 2680 - RNA, 21 nt, Homo sapiens
uaacgcauaauauggacaugu

SEQ ID NO: 2681 - RNA, 21 nt, Homo sapiens
acauguccauauuaugcguua

SEQ ID NO: 2682 - RNA, 22 nt, Homo sapiens
uugaggaaaagauggucuuauu

SEQ ID NO: 2683 - RNA, 22 nt, Homo sapiens
aauaagaccaucuuuuccucaa

SEQ ID NO: 2684 - RNA, 26 nt, Homo sapiens
aagaggaagaaauggcugguucucag

SEQ ID NO: 2685 - RNA, 26 nt, Homo sapiens
cugagaaccagccauuucuuccucuu

SEQ ID NO: 2686 - RNA, 20 nt, Homo sapiens
gcucggacugagcagguggg

SEQ ID NO: 2687 - RNA, 20 nt, Homo sapiens
cccaccugcucaguccgagc

SEQ ID NO: 2688 - RNA, 21 nt, Homo sapiens
acagggccgcagauggagacu

SEQ ID NO: 2689 - RNA, 21 nt, Homo sapiens
agucuccaucugcggcccugu

SEQ ID NO: 2690 - RNA, 21 nt, Homo sapiens
gcagagaacaaaggacucagu

SEQ ID NO: 2691 - RNA, 21 nt, Homo sapiens
acugaguccuuuguucucugc

SEQ ID NO: 2692 - RNA, 22 nt, Homo sapiens
acugauuaucuuaacucucuga

SEQ ID NO: 2693 - RNA, 22 nt, Homo sapiens
ucagagaguuaagauaaucagu

SEQ ID NO: 2694 - RNA, 23 nt, Homo sapiens
ucucugaguaccauaugccuugu

SEQ ID NO: 2695 - RNA, 23 nt, Homo sapiens
acaaggcauaugguacucagaga

SEQ ID NO: 2696 - RNA, 22 nt, Homo sapiens
aacuaguaauguuggauuaggg

SEQ ID NO: 2697 - RNA, 22 nt, Homo sapiens
cccuaauccaacauuacuaguu

SEQ ID NO: 2698 - RNA, 22 nt, Homo sapiens
auauguauaugugacugcuacu

SEQ ID NO: 2699 - RNA, 22 nt, Homo sapiens
aguagcagucacauauacauau

SEQ ID NO: 2700 - RNA, 21 nt, Homo sapiens
uggccaaaaagcaggcagaga

SEQ ID NO: 2701 - RNA, 21 nt, Homo sapiens
ucucugccugcuuuuuggcca

SEQ ID NO: 2702 - RNA, 22 nt, Homo sapiens
ggaggaaccuuggagcuucggc

SEQ ID NO: 2703 - RNA, 22 nt, Homo sapiens
gccgaagcuccaagguuccucc

SEQ ID NO: 2704 - RNA, 23 nt, Homo sapiens
gaggcugaugugaguagaccacu

SEQ ID NO: 2705 - RNA, 23 nt, Homo sapiens
aguggucuacucacaucagccuc

SEQ ID NO: 2706 - RNA, 21 nt, Homo sapiens
cuguccuaagguuguugaguu

SEQ ID NO: 2707 - RNA, 21 nt, Homo sapiens
aacucaacaaccuuaggacag

SEQ ID NO: 2708 - RNA, 21 nt, Homo sapiens
ucuucaaccucaggacuugca

SEQ ID NO: 2709 - RNA, 21 nt, Homo sapiens
ugcaaguccugagguugaaga

SEQ ID NO: 2710 - RNA, 22 nt, Homo sapiens
ugugauaucaugguuccuggga

SEQ ID NO: 2711 - RNA, 22 nt, Homo sapiens
ucccaggaaccaugauaucaca

SEQ ID NO: 2712 - RNA, 22 nt, Homo sapiens
cugggaggugugauauuguggu

SEQ ID NO: 2713 - RNA, 22 nt, Homo sapiens
accacaauaucacaccucccag

SEQ ID NO: 2714 - RNA, 22 nt, Homo sapiens
cagguagauauuugauaggcau

SEQ ID NO: 2715 - RNA, 22 nt, Homo sapiens
augccuaucaaauaucuaccug

SEQ ID NO: 2716 - RNA, 21 nt, Homo sapiens
gccuaucacauaucugccugu

SEQ ID NO: 2717 - RNA, 21 nt, Homo sapiens
acaggcagauaugugauaggc

SEQ ID NO: 2718 - RNA, 20 nt, Homo sapiens
gggcuggggcgcggggaggu

SEQ ID NO: 2719 - RNA, 20 nt, Homo sapiens
accuccccgcgccccagccc

SEQ ID NO: 2720 - RNA, 18 nt, Homo sapiens
ugcuuccuuucagagggu

SEQ ID NO: 2721 - RNA, 18 nt, Homo sapiens
acccucugaaaggaagca

SEQ ID NO: 2722 - RNA, 21 nt, Homo sapiens
ugaguuggccaucugagugag

SEQ ID NO: 2723 - RNA, 21 nt, Homo sapiens
cucacucagauggccaacuca

SEQ ID NO: 2724 - RNA, 23 nt, Homo sapiens
aacauucauuguugucggugggu

SEQ ID NO: 2725 - RNA, 23 nt, Homo sapiens
acccaccgacaacaaugaauguu

SEQ ID NO: 2726 - RNA, 21 nt, Homo sapiens
ucacagugaaccggucucuuu

SEQ ID NO: 2727 - RNA, 21 nt, Homo sapiens
aaagagaccgguucacuguga

SEQ ID NO: 2728 - RNA, 22 nt, Homo sapiens
caacaaaucacagucugccaua

SEQ ID NO: 2729 - RNA, 22 nt, Homo sapiens
uauggcagacugugauuuguug

SEQ ID NO: 2730 - RNA, 21 nt, Homo sapiens
cucacugaacaaugaaugcaa

SEQ ID NO: 2731 - RNA, 21 nt, Homo sapiens
uugcauucauuguucagugag

SEQ ID NO: 2732 - RNA, 23 nt, Homo sapiens
aacauucauugcugucggugggu

SEQ ID NO: 2733 - RNA, 23 nt, Homo sapiens
acccaccgacagcaaugaauguu

SEQ ID NO: 2734 - RNA, 22 nt, Homo sapiens
accaucgaccguugauuguacc

SEQ ID NO: 2735 - RNA, 22 nt, Homo sapiens
gguacaaucaacggucgauggu

SEQ ID NO: 2736 - RNA, 23 nt, Homo sapiens
aacauucaacgcugucggugagu

SEQ ID NO: 2737 - RNA, 23 nt, Homo sapiens
acucaccgacagcguugaauguu

SEQ ID NO: 2738 - RNA, 22 nt, Homo sapiens
accacugaccguugacuguacc

SEQ ID NO: 2739 - RNA, 22 nt, Homo sapiens
gguacagucaacggucaguggu

SEQ ID NO: 2740 - RNA, 22 nt, Homo sapiens
cuguugccacuaaccucaaccu

SEQ ID NO: 2741 - RNA, 22 nt, Homo sapiens
agguugagguuaguggcaacag

SEQ ID NO: 2742 - RNA, 22 nt, Homo sapiens
auaagacgagcaaaaagcuugu

SEQ ID NO: 2743 - RNA, 22 nt, Homo sapiens
acaagcuuuuugcucgucuuau

SEQ ID NO: 2744 - RNA, 22 nt, Homo sapiens
auaagacgaacaaaagguuugu

SEQ ID NO: 2745 - RNA, 22 nt, Homo sapiens
acaaaccuuuuguucgucuuau

SEQ ID NO: 2746 - RNA, 21 nt, Homo sapiens
agggagggacgggggcugugc

SEQ ID NO: 2747 - RNA, 21 nt, Homo sapiens
gcacagcccccgucccucccu

SEQ ID NO: 2748 - RNA, 23 nt, Homo sapiens
ucuggcuccgugucuucacuccc

SEQ ID NO: 2749 - RNA, 23 nt, Homo sapiens
gggagugaagacacggagccaga

SEQ ID NO: 2750 - RNA, 22 nt, Homo sapiens
uggaauguaaagaaguauguau

SEQ ID NO: 2751 - RNA, 22 nt, Homo sapiens
auacauacuucuuuacauucca

SEQ ID NO: 2752 - RNA, 22 nt, Homo sapiens
aacaucacagcaagucugugcu

SEQ ID NO: 2753 - RNA, 22 nt, Homo sapiens
agcacagacuugcugugauguu

SEQ ID NO: 2754 - RNA, 21 nt, Homo sapiens
uuaagacuugcagugauguuu

SEQ ID NO: 2755 - RNA, 21 nt, Homo sapiens
aaacaucacugcaagucuuaa

SEQ ID NO: 2756 - RNA, 22 nt, Homo sapiens
aacaucacugcaagucuuaaca

SEQ ID NO: 2757 - RNA, 22 nt, Homo sapiens
uguuaagacuugcagugauguu

SEQ ID NO: 2758 - RNA, 21 nt, Homo sapiens
acagacuugcugugauguuca

SEQ ID NO: 2759 - RNA, 21 nt, Homo sapiens
ugaacaucacagcaagucugu

SEQ ID NO: 2760 - RNA, 22 nt, Homo sapiens
aaaccguuaccauuacugaguu

SEQ ID NO: 2761 - RNA, 22 nt, Homo sapiens
aacucaguaaugguaacgguuu

SEQ ID NO: 2762 - RNA, 22 nt, Homo sapiens
uagcaagagaaccauuaccauu

SEQ ID NO: 2763 - RNA, 22 nt, Homo sapiens
aaugguaaugguucucuugcua

SEQ ID NO: 2764 - RNA, 23 nt, Homo sapiens
ugaggggcagagagcgagacuuu

SEQ ID NO: 2765 - RNA, 23 nt, Homo sapiens
aaagucucgcucucugccccuca

SEQ ID NO: 2766 - RNA, 22 nt, Homo sapiens
caagcucgcuucuaugggucug

SEQ ID NO: 2767 - RNA, 22 nt, Homo sapiens
cagacccauagaagcgagcuug

SEQ ID NO: 2768 - RNA, 22 nt, Homo sapiens
aacccguagauccgaucuugug

SEQ ID NO: 2769 - RNA, 22 nt, Homo sapiens
cacaagaucggaucuacggguu

SEQ ID NO: 2770 - RNA, 22 nt, Homo sapiens
caagcucgugucuguggguccg

SEQ ID NO: 2771 - RNA, 22 nt, Homo sapiens
cggacccacagacacgagcuug

SEQ ID NO: 2772 - RNA, 22 nt, Homo sapiens
cacccguagaaccgaccuugcg

SEQ ID NO: 2773 - RNA, 22 nt, Homo sapiens
cgcaaggucgguucuacgggug

SEQ ID NO: 2774 - RNA, 23 nt, Homo sapiens
uggagacgcggcccuguuggagu

SEQ ID NO: 2775 - RNA, 23 nt, Homo sapiens
acuccaacagggccgcgucucca

SEQ ID NO: 2776 - RNA, 23 nt, Homo sapiens
ucuacagugcacgugucuccagu

SEQ ID NO: 2777 - RNA, 23 nt, Homo sapiens
acuggagacacgugcacuguaga

SEQ ID NO: 2778 - RNA, 22 nt, Homo sapiens
caaauucguaucuaggggaaua

SEQ ID NO: 2779 - RNA, 22 nt, Homo sapiens
uauuccccuagauacgaauuug

SEQ ID NO: 2780 - RNA, 23 nt, Homo sapiens
uacccuguagauccgaauuugug

SEQ ID NO: 2781 - RNA, 23 nt, Homo sapiens
cacaaauucggaucuacagggua

SEQ ID NO: 2782 - RNA, 23 nt, Homo sapiens
ccugcagcgacuugauggcuucc

SEQ ID NO: 2783 - RNA, 23 nt, Homo sapiens
ggaagccaucaagucgcugcagg

SEQ ID NO: 2784 - RNA, 22 nt, Homo sapiens
ucagugcacuacagaacuuugu

SEQ ID NO: 2785 - RNA, 22 nt, Homo sapiens
acaaaguucuguagugcacuga

SEQ ID NO: 2786 - RNA, 22 nt, Homo sapiens
aaaguucugagacacuccgacu

SEQ ID NO: 2787 - RNA, 22 nt, Homo sapiens
agucggagugucucagaacuuu

SEQ ID NO: 2788 - RNA, 22 nt, Homo sapiens
ccuguucuccauuacuuggcuc

SEQ ID NO: 2789 - RNA, 22 nt, Homo sapiens
gagccaaguaauggagaacagg

SEQ ID NO: 2790 - RNA, 21 nt, Homo sapiens
uucaaguaauucaggauaggu

SEQ ID NO: 2791 - RNA, 21 nt, Homo sapiens
accuauccugaauuacuugaa

SEQ ID NO: 2792 - RNA, 22 nt, Homo sapiens
gcccugaacgaggggucuggag

SEQ ID NO: 2793 - RNA, 22 nt, Homo sapiens
cuccagaccccucguucagggc

SEQ ID NO: 2794 - RNA, 22 nt, Homo sapiens
gcugacuccuaguccagggcuc

SEQ ID NO: 2795 - RNA, 22 nt, Homo sapiens
gagcccuggacuaggagucagc

SEQ ID NO: 2796 - RNA, 22 nt, Homo sapiens
aucacacaaaggcaacuuuugu

SEQ ID NO: 2797 - RNA, 22 nt, Homo sapiens
acaaaaguugccuuugugugau

SEQ ID NO: 2798 - RNA, 22 nt, Homo sapiens
agagguugcccuuggugaauuc

SEQ ID NO: 2799 - RNA, 22 nt, Homo sapiens
gaauucaccaagggcaaccucu

SEQ ID NO: 2800 - RNA, 21 nt, Homo sapiens
gguagauuuuccuucuauggu

SEQ ID NO: 2801 - RNA, 21 nt, Homo sapiens
accauagaaggaaaaucuacc

SEQ ID NO: 2802 - RNA, 21 nt, Homo sapiens
aucauagaggaaaauccacgu

SEQ ID NO: 2803 - RNA, 21 nt, Homo sapiens
acguggauuuuccucuaugau

SEQ ID NO: 2804 - RNA, 22 nt, Homo sapiens
guagauucuccuucuaugagua

SEQ ID NO: 2805 - RNA, 22 nt, Homo sapiens
uacucauagaaggagaaucuac

SEQ ID NO: 2806 - RNA, 22 nt, Homo sapiens
cugguacaggccugggggacag

SEQ ID NO: 2807 - RNA, 22 nt, Homo sapiens
cugucccccaggccuguaccag

SEQ ID NO: 2808 - RNA, 22 nt, Homo sapiens
ucucccaacccuuguaccagug

SEQ ID NO: 2809 - RNA, 22 nt, Homo sapiens
cacugguacaaggguugggaga

SEQ ID NO: 2810 - RNA, 22 nt, Homo sapiens
acggguuaggcucuugggagcu

SEQ ID NO: 2811 - RNA, 22 nt, Homo sapiens
agcucccaagagccuaacccgu

SEQ ID NO: 2812 - RNA, 22 nt, Homo sapiens
ucacaagucaggcucuugggac

SEQ ID NO: 2813 - RNA, 22 nt, Homo sapiens
gucccaagagccugacuuguga

SEQ ID NO: 2814 - RNA, 22 nt, Homo sapiens
aacccguagauccgaacuugug

SEQ ID NO: 2815 - RNA, 22 nt, Homo sapiens
cacaaguucggaucuacggguu

SEQ ID NO: 2816 - RNA, 21 nt, Homo sapiens
cuguacaggccacugccuugc

SEQ ID NO: 2817 - RNA, 21 nt, Homo sapiens
gcaaggcaguggccuguacag

SEQ ID NO: 2818 - RNA, 22 nt, Homo sapiens
ugagguaguaguuuguacaguu

SEQ ID NO: 2819 - RNA, 22 nt, Homo sapiens
aacuguacaaacuacuaccuca

SEQ ID NO: 2820 - RNA, 22 nt, Homo sapiens
ucccugagacccuaacuuguga

SEQ ID NO: 2821 - RNA, 22 nt, Homo sapiens
ucacaaguuagggucucaggga

SEQ ID NO: 2822 - RNA, 22 nt, Homo sapiens
caagcuuguaucuauagguaug

SEQ ID NO: 2823 - RNA, 22 nt, Homo sapiens
cauaccuauagauacaagcuug

SEQ ID NO: 2824 - RNA, 23 nt, Homo sapiens
aaagugcugcgacauuugagcgu

SEQ ID NO: 2825 - RNA, 23 nt, Homo sapiens
acgcucaaaugucgcagcacuuu

SEQ ID NO: 2826 - RNA, 22 nt, Homo sapiens
uuuagagacggggucuugcucu

SEQ ID NO: 2827 - RNA, 22 nt, Homo sapiens
agagcaagaccccgucucuaaa

SEQ ID NO: 2828 - RNA, 24 nt, Homo sapiens
uggcccugacugaagaccagcagu

SEQ ID NO: 2829 - RNA, 24 nt, Homo sapiens
acugcuggucuucagucagggcca

SEQ ID NO: 2830 - RNA, 21 nt, Homo sapiens
gcgacccauacuugguuucag

SEQ ID NO: 2831 - RNA, 21 nt, Homo sapiens
cugaaaccaaguaugggucgc

SEQ ID NO: 2832 - RNA, 22 nt, Homo sapiens
gaaaucaagcgugggugagacc

SEQ ID NO: 2833 - RNA, 22 nt, Homo sapiens
ggucucacccacgcuugauuuc

SEQ ID NO: 2834 - RNA, 21 nt, Homo sapiens
cccugggccucugcuccccag

SEQ ID NO: 2835 - RNA, 21 nt, Homo sapiens
cuggggagcagaggcccaggg

SEQ ID NO: 2836 - RNA, 24 nt, Homo sapiens
uggggagcugaggcucugggggug

SEQ ID NO: 2837 - RNA, 24 nt, Homo sapiens
cacccccagagccucagcucccca

SEQ ID NO: 2838 - RNA, 20 nt, Homo sapiens
ggggagcuguggaagcagua

SEQ ID NO: 2839 - RNA, 20 nt, Homo sapiens
uacugcuuccacagcucccc

SEQ ID NO: 2840 - RNA, 25 nt, Homo sapiens
cuagugagggacagaaccaggauuc

SEQ ID NO: 2841 - RNA, 25 nt, Homo sapiens
gaauccugguucugucccucacuag

SEQ ID NO: 2842 - RNA, 20 nt, Homo sapiens
agagucuugugaugucuugc

SEQ ID NO: 2843 - RNA, 20 nt, Homo sapiens
gcaagacaucacaagacucu

SEQ ID NO: 2844 - RNA, 23 nt, Homo sapiens
gcagcagagaauaggacuacguc

SEQ ID NO: 2845 - RNA, 23 nt, Homo sapiens
gacguaguccuauucucugcugc

SEQ ID NO: 2846 - RNA, 23 nt, Homo sapiens
ugagcgccucgacgacagagccg

SEQ ID NO: 2847 - RNA, 23 nt, Homo sapiens
cggcucugucgucgaggcgcuca

SEQ ID NO: 2848 - RNA, 23 nt, Homo sapiens
ucccuguccuccaggagcucacg

SEQ ID NO: 2849 - RNA, 23 nt, Homo sapiens
cgugagcuccuggaggacaggga

SEQ ID NO: 2850 - RNA, 22 nt, Homo sapiens
cuauacggccuccuagcuuucc

SEQ ID NO: 2851 - RNA, 22 nt, Homo sapiens
ggaaagcuaggaggccguauag

SEQ ID NO: 2852 - RNA, 22 nt, Homo sapiens
ugagguaggagguuguauaguu

SEQ ID NO: 2853 - RNA, 22 nt, Homo sapiens
aacuauacaaccuccuaccuca

SEQ ID NO: 2854 - RNA, 22 nt, Homo sapiens
cugcgcaagcuacugccuugcu

SEQ ID NO: 2855 - RNA, 22 nt, Homo sapiens
agcaaggcaguagcuugcgcag

SEQ ID NO: 2856 - RNA, 22 nt, Homo sapiens
ugagguaguaguuugugcuguu

SEQ ID NO: 2857 - RNA, 22 nt, Homo sapiens
aacagcacaaacuacuaccuca

SEQ ID NO: 2858 - RNA, 22 nt, Homo sapiens
ugcccuguggacucaguucugg

SEQ ID NO: 2859 - RNA, 22 nt, Homo sapiens
ccagaacugaguccacagggca

SEQ ID NO: 2860 - RNA, 21 nt, Homo sapiens
ugguucuagacuugccaacua

SEQ ID NO: 2861 - RNA, 21 nt, Homo sapiens
uaguuggcaagucuagaacca

SEQ ID NO: 2862 - RNA, 23 nt, Homo sapiens
ugucugcccgcaugccugccucu

SEQ ID NO: 2863 - RNA, 23 nt, Homo sapiens
agaggcaggcaugcgggcagaca

SEQ ID NO: 2864 - RNA, 22 nt, Homo sapiens
aaaaguaauugcggucuuuggu

SEQ ID NO: 2865 - RNA, 22 nt, Homo sapiens
accaaagaccgcaauuacuuuu

SEQ ID NO: 2866 - RNA, 18 nt, Homo sapiens
ucgaggagcucacagucu

SEQ ID NO: 2867 - RNA, 18 nt, Homo sapiens
agacugugagcuccucga

SEQ ID NO: 2868 - RNA, 22 nt, Homo sapiens
cuauacaaucuauugccuuccc

SEQ ID NO: 2869 - RNA, 22 nt, Homo sapiens
gggaaggcaauagauuguauag

SEQ ID NO: 2870 - RNA, 22 nt, Homo sapiens
cuauacagucuacugucuuucc

SEQ ID NO: 2871 - RNA, 22 nt, Homo sapiens
ggaaagacaguagacuguauag

SEQ ID NO: 2872 - RNA, 22 nt, Homo sapiens
ugagguaguagauuguauaguu

SEQ ID NO: 2873 - RNA, 22 nt, Homo sapiens
aacuauacaaucuacuaccuca

SEQ ID NO: 2874 - RNA, 22 nt, Homo sapiens
aaaaguaauugugguuuuggcc

SEQ ID NO: 2875 - RNA, 22 nt, Homo sapiens
ggccaaaaccacaauuacuuuu

SEQ ID NO: 2876 - RNA, 22 nt, Homo sapiens
aaaaguaauugcgguuuuugcc

SEQ ID NO: 2877 - RNA, 22 nt, Homo sapiens
ggcaaaaaccgcaauuacuuuu

SEQ ID NO: 2878 - RNA, 22 nt, Homo sapiens
ccucugaaauucaguucuucag

SEQ ID NO: 2879 - RNA, 22 nt, Homo sapiens
cugaagaacugaauuucagagg

SEQ ID NO: 2880 - RNA, 22 nt, Homo sapiens
ugagaacugaauuccauggguu

SEQ ID NO: 2881 - RNA, 22 nt, Homo sapiens
aacccauggaauucaguucuca

SEQ ID NO: 2882 - RNA, 22 nt, Homo sapiens
acagcaggcacagacaggcagu

SEQ ID NO: 2883 - RNA, 22 nt, Homo sapiens
acugccugucugugccugcugu

SEQ ID NO: 2884 - RNA, 22 nt, Homo sapiens
ugccugucuacacuugcugugc

SEQ ID NO: 2885 - RNA, 22 nt, Homo sapiens
gcacagcaaguguagacaggca

SEQ ID NO: 2886 - RNA, 22 nt, Homo sapiens
uagcaccaucugaaaucgguua

SEQ ID NO: 2887 - RNA, 22 nt, Homo sapiens
uaaccgauuucagauggugcua

SEQ ID NO: 2888 - RNA, 22 nt, Homo sapiens
acugauuucuuuugguguucag

SEQ ID NO: 2889 - RNA, 22 nt, Homo sapiens
cugaacaccaaaagaaaucagu

SEQ ID NO: 2890 - RNA, 24 nt, Homo sapiens
gcugguuucauauggugguuuaga

SEQ ID NO: 2891 - RNA, 24 nt, Homo sapiens
ucuaaaccaccauaugaaaccagc

SEQ ID NO: 2892 - RNA, 22 nt, Homo sapiens
cugguuucacaugguggcuuag

SEQ ID NO: 2893 - RNA, 22 nt, Homo sapiens
cuaagccaccaugugaaaccag

SEQ ID NO: 2894 - RNA, 23 nt, Homo sapiens
uagcaccauuugaaaucaguguu

SEQ ID NO: 2895 - RNA, 23 nt, Homo sapiens
aacacugauuucaaauggugcua

SEQ ID NO: 2896 - RNA, 22 nt, Homo sapiens
uagcaccauuugaaaucgguua

SEQ ID NO: 2897 - RNA, 22 nt, Homo sapiens
uaaccgauuucaaauggugcua

SEQ ID NO: 2898 - RNA, 22 nt, Homo sapiens
ugaccgauuucuccugguguuc

SEQ ID NO: 2899 - RNA, 22 nt, Homo sapiens
gaacaccaggagaaaucgguca

SEQ ID NO: 2900 - RNA, 23 nt, Homo sapiens
ugucacucggcucggcccacuac

SEQ ID NO: 2901 - RNA, 23 nt, Homo sapiens
guagugggccgagccgagugaca

SEQ ID NO: 2902 - RNA, 22 nt, Homo sapiens
cugccaauuccauaggucacag

SEQ ID NO: 2903 - RNA, 22 nt, Homo sapiens
cugugaccuauggaauuggcag

SEQ ID NO: 2904 - RNA, 21 nt, Homo sapiens
cugaccuaugaauugacagcc

SEQ ID NO: 2905 - RNA, 21 nt, Homo sapiens
ggcugucaauucauaggucag

SEQ ID NO: 2906 - RNA, 20 nt, Homo sapiens
acugccccaggugcugcugg

SEQ ID NO: 2907 - RNA, 20 nt, Homo sapiens
ccagcagcaccuggggcagu

SEQ ID NO: 2908 - RNA, 22 nt, Homo sapiens
aacgccauuaucacacuaaaua

SEQ ID NO: 2909 - RNA, 22 nt, Homo sapiens
uauuuagugugauaauggcguu

SEQ ID NO: 2910 - RNA, 22 nt, Homo sapiens
cuuucagucggauguuugcagc

SEQ ID NO: 2911 - RNA, 22 nt, Homo sapiens
gcugcaaacauccgacugaaag

SEQ ID NO: 2912 - RNA, 22 nt, Homo sapiens
aauugcacgguauccaucugua

SEQ ID NO: 2913 - RNA, 22 nt, Homo sapiens
uacagauggauaccgugcaauu

SEQ ID NO: 2914 - RNA, 22 nt, Homo sapiens
cggguggaucacgaugcaauuu

SEQ ID NO: 2915 - RNA, 22 nt, Homo sapiens
aaauugcaucgugauccacccg

SEQ ID NO: 2916 - RNA, 22 nt, Homo sapiens
cugggagguggauguuuacuuc

SEQ ID NO: 2917 - RNA, 22 nt, Homo sapiens
gaaguaaacauccaccucccag

SEQ ID NO: 2918 - RNA, 22 nt, Homo sapiens
uguaaacauccuacacucagcu

SEQ ID NO: 2919 - RNA, 22 nt, Homo sapiens
agcugaguguaggauguuuaca

SEQ ID NO: 2920 - RNA, 22 nt, Homo sapiens
cugggagaggguuguuuacucc

SEQ ID NO: 2921 - RNA, 22 nt, Homo sapiens
ggaguaaacaacccucucccag

SEQ ID NO: 2922 - RNA, 22 nt, Homo sapiens
cugggagaaggcuguuuacucu

SEQ ID NO: 2923 - RNA, 22 nt, Homo sapiens
agaguaaacagccuucucccag

SEQ ID NO: 2924 - RNA, 23 nt, Homo sapiens
uguaaacauccuacacucucagc

SEQ ID NO: 2925 - RNA, 23 nt, Homo sapiens
gcugagaguguaggauguuuaca

SEQ ID NO: 2926 - RNA, 22 nt, Homo sapiens
uuuuucauuauugcuccugacc

SEQ ID NO: 2927 - RNA, 22 nt, Homo sapiens
ggucaggagcaauaaugaaaaa

SEQ ID NO: 2928 - RNA, 23 nt, Homo sapiens
ucaagagcaauaacgaaaaaugu

SEQ ID NO: 2929 - RNA, 23 nt, Homo sapiens
acauuuuucguuauugcucuuga

SEQ ID NO: 2930 - RNA, 23 nt, Homo sapiens
caaagugcuuacagugcagguag

SEQ ID NO: 2931 - RNA, 23 nt, Homo sapiens
cuaccugcacuguaagcacuuug

SEQ ID NO: 2932 - RNA, 22 nt, Homo sapiens
ggauuccuggaaauacuguucu

SEQ ID NO: 2933 - RNA, 22 nt, Homo sapiens
agaacaguauuuccaggaaucc

SEQ ID NO: 2934 - RNA, 23 nt, Homo sapiens
guccaguuuucccaggaaucccu

SEQ ID NO: 2935 - RNA, 23 nt, Homo sapiens
agggauuccugggaaaacuggac

SEQ ID NO: 2936 - RNA, 22 nt, Homo sapiens
acugcauuaugagcacuuaaag

SEQ ID NO: 2937 - RNA, 22 nt, Homo sapiens
cuuuaagugcucauaaugcagu

SEQ ID NO: 2938 - RNA, 23 nt, Homo sapiens
uaaagugcuuauagugcagguag

SEQ ID NO: 2939 - RNA, 23 nt, Homo sapiens
cuaccugcacuauaagcacuuua

SEQ ID NO: 2940 - RNA, 22 nt, Homo sapiens
gaggguuggguggaggcucucc

SEQ ID NO: 2941 - RNA, 22 nt, Homo sapiens
ggagagccuccacccaacccuc

SEQ ID NO: 2942 - RNA, 22 nt, Homo sapiens
cugugcgugugacagcggcuga

SEQ ID NO: 2943 - RNA, 22 nt, Homo sapiens
ucagccgcugucacacgcacag

SEQ ID NO: 2944 - RNA, 22 nt, Homo sapiens
ccaguggggcugcuguuaucug

SEQ ID NO: 2945 - RNA, 22 nt, Homo sapiens
cagauaacagcagccccacugg

SEQ ID NO: 2946 - RNA, 22 nt, Homo sapiens
uguaacagcaacuccaugugga

SEQ ID NO: 2947 - RNA, 22 nt, Homo sapiens
uccacauggaguugcuguuaca

SEQ ID NO: 2948 - RNA, 22 nt, Homo sapiens
ucacaguggucucugggauuau

SEQ ID NO: 2949 - RNA, 22 nt, Homo sapiens
auaaucccagagaccacuguga

SEQ ID NO: 2950 - RNA, 22 nt, Homo sapiens
uaaucucagcuggcaacuguga

SEQ ID NO: 2951 - RNA, 22 nt, Homo sapiens
ucacaguugccagcugagauua

SEQ ID NO: 2952 - RNA, 22 nt, Homo sapiens
cagugccucggcagugcagccc

SEQ ID NO: 2953 - RNA, 22 nt, Homo sapiens
gggcugcacugccgaggcacug

SEQ ID NO: 2954 - RNA, 20 nt, Homo sapiens
gugcauugcuguugcauugc

SEQ ID NO: 2955 - RNA, 20 nt, Homo sapiens
gcaaugcaacagcaaugcac

SEQ ID NO: 2956 - RNA, 19 nt, Homo sapiens
acuggacuuggaggcagaa

SEQ ID NO: 2957 - RNA, 19 nt, Homo sapiens
uucugccuccaaguccagu

SEQ ID NO: 2958 - RNA, 25 nt, Homo sapiens
acuggacuuggagucagaagagugg

SEQ ID NO: 2959 - RNA, 25 nt, Homo sapiens
ccacucuucugacuccaaguccagu

SEQ ID NO: 2960 - RNA, 20 nt, Homo sapiens
acuggacuuggagucagaaa

SEQ ID NO: 2961 - RNA, 20 nt, Homo sapiens
uuucugacuccaaguccagu

SEQ ID NO: 2962 - RNA, 19 nt, Homo sapiens
acuggacuuggagucagga

SEQ ID NO: 2963 - RNA, 19 nt, Homo sapiens
uccugacuccaaguccagu

SEQ ID NO: 2964 - RNA, 20 nt, Homo sapiens
acuggacuuggagccagaag

SEQ ID NO: 2965 - RNA, 20 nt, Homo sapiens
cuucuggcuccaaguccagu

SEQ ID NO: 2966 - RNA, 20 nt, Homo sapiens
acugggcuuggagucagaag

SEQ ID NO: 2967 - RNA, 20 nt, Homo sapiens
cuucugacuccaagcccagu

SEQ ID NO: 2968 - RNA, 21 nt, Homo sapiens
acuggacuuggugucagaugg

SEQ ID NO: 2969 - RNA, 21 nt, Homo sapiens
ccaucugacaccaaguccagu

SEQ ID NO: 2970 - RNA, 21 nt, Homo sapiens
acuggacuaggagucagaagg

SEQ ID NO: 2971 - RNA, 21 nt, Homo sapiens
ccuucugacuccuaguccagu

SEQ ID NO: 2972 - RNA, 19 nt, Homo sapiens
acuggauuuggagccagaa

SEQ ID NO: 2973 - RNA, 19 nt, Homo sapiens
uucuggcuccaaauccagu

SEQ ID NO: 2974 - RNA, 20 nt, Homo sapiens
aggaauguuccuucuuugcc

SEQ ID NO: 2975 - RNA, 20 nt, Homo sapiens
ggcaaagaaggaacauuccu

SEQ ID NO: 2976 - RNA, 21 nt, Homo sapiens
ucagugcaugacagaacuugg

SEQ ID NO: 2977 - RNA, 21 nt, Homo sapiens
ccaaguucugucaugcacuga

SEQ ID NO: 2978 - RNA, 20 nt, Homo sapiens
ucacaccugccucgcccccc

SEQ ID NO: 2979 - RNA, 20 nt, Homo sapiens
ggggggcgaggcagguguga

SEQ ID NO: 2980 - RNA, 21 nt, Homo sapiens
gugggcgggggcaggugugug

SEQ ID NO: 2981 - RNA, 21 nt, Homo sapiens
cacacaccugcccccgcccac

SEQ ID NO: 2982 - RNA, 22 nt, Homo sapiens
acgcccuucccccccuucuuca

SEQ ID NO: 2983 - RNA, 22 nt, Homo sapiens
ugaagaagggggggaagggcgu

SEQ ID NO: 2984 - RNA, 22 nt, Homo sapiens
uugcauauguaggaugucccau

SEQ ID NO: 2985 - RNA, 22 nt, Homo sapiens
augggacauccuacauaugcaa

SEQ ID NO: 2986 - RNA, 23 nt, Homo sapiens
guuugcacgggugggccuugucu

SEQ ID NO: 2987 - RNA, 23 nt, Homo sapiens
agacaaggcccacccgugcaaac

SEQ ID NO: 2988 - RNA, 22 nt, Homo sapiens
gacuauagaacuuucccccuca

SEQ ID NO: 2989 - RNA, 22 nt, Homo sapiens
ugagggggaaaguucuauaguc

SEQ ID NO: 2990 - RNA, 21 nt, Homo sapiens
agggggaaaguucuauagucc

SEQ ID NO: 2991 - RNA, 21 nt, Homo sapiens
ggacuauagaacuuucccccu

SEQ ID NO: 2992 - RNA, 21 nt, Homo sapiens
cuuuuugcggucugggcuugc

SEQ ID NO: 2993 - RNA, 21 nt, Homo sapiens
gcaagcccagaccgcaaaaag

SEQ ID NO: 2994 - RNA, 21 nt, Homo sapiens
ucuuguguucucuagaucagu

SEQ ID NO: 2995 - RNA, 21 nt, Homo sapiens
acugaucuagagaacacaaga

SEQ ID NO: 2996 - RNA, 23 nt, Homo sapiens
cccaguguucagacuaccuguuc

SEQ ID NO: 2997 - RNA, 23 nt, Homo sapiens
gaacagguagucugaacacuggg

SEQ ID NO: 2998 - RNA, 22 nt, Homo sapiens
acaguagucugcacauugguua

SEQ ID NO: 2999 - RNA, 22 nt, Homo sapiens
uaaccaaugugcagacuacugu

SEQ ID NO: 3000 - RNA, 22 nt, Homo sapiens
acaguagucugcacauugguua

SEQ ID NO: 3001 - RNA, 22 nt, Homo sapiens
uaaccaaugugcagacuacugu

SEQ ID NO: 3002 - RNA, 23 nt, Homo sapiens
cccaguguuuagacuaucuguuc

SEQ ID NO: 3003 - RNA, 23 nt, Homo sapiens
gaacagauagucuaaacacuggg

SEQ ID NO: 3004 - RNA, 22 nt, Homo sapiens
uggagugugacaaugguguuug

SEQ ID NO: 3005 - RNA, 22 nt, Homo sapiens
caaacaccauugucacacucca

SEQ ID NO: 3006 - RNA, 22 nt, Homo sapiens
ugcccuaaaugccccuucuggc

SEQ ID NO: 3007 - RNA, 22 nt, Homo sapiens
gccagaaggggcauuuagggca

SEQ ID NO: 3008 - RNA, 23 nt, Homo sapiens
uaaggugcaucuagugcaguuag

SEQ ID NO: 3009 - RNA, 23 nt, Homo sapiens
cuaacugcacuagaugcaccuua

SEQ ID NO: 3010 - RNA, 22 nt, Homo sapiens
cuccuauaugaugccuuucuuc

SEQ ID NO: 3011 - RNA, 22 nt, Homo sapiens
gaagaaaggcaucauauaggag

SEQ ID NO: 3012 - RNA, 21 nt, Homo sapiens
gaacggcuucauacaggaguu

SEQ ID NO: 3013 - RNA, 21 nt, Homo sapiens
aacuccuguaugaagccguuc

SEQ ID NO: 3014 - RNA, 22 nt, Homo sapiens
ugugacugguugaccagagggg

SEQ ID NO: 3015 - RNA, 22 nt, Homo sapiens
ccccucuggucaaccagucaca

SEQ ID NO: 3016 - RNA, 23 nt, Homo sapiens
acugcccuaagugcuccuucugg

SEQ ID NO: 3017 - RNA, 23 nt, Homo sapiens
ccagaaggagcacuuagggcagu

SEQ ID NO: 3018 - RNA, 23 nt, Homo sapiens
uaaggugcaucuagugcagauag

SEQ ID NO: 3019 - RNA, 23 nt, Homo sapiens
cuaucugcacuagaugcaccuua

SEQ ID NO: 3020 - RNA, 22 nt, Homo sapiens
cagugcaaugaugaaagggcau

SEQ ID NO: 3021 - RNA, 22 nt, Homo sapiens
augcccuuucaucauugcacug

SEQ ID NO: 3022 - RNA, 21 nt, Homo sapiens
acucuuucccuguugcacuac

SEQ ID NO: 3023 - RNA, 21 nt, Homo sapiens
guagugcaacagggaaagagu

SEQ ID NO: 3024 - RNA, 24 nt, Homo sapiens
uuuggcaaugguagaacucacacu

SEQ ID NO: 3025 - RNA, 24 nt, Homo sapiens
agugugaguucuaccauugccaaa

SEQ ID NO: 3026 - RNA, 21 nt, Homo sapiens
agggcccccccucaauccugu

SEQ ID NO: 3027 - RNA, 21 nt, Homo sapiens
acaggauugagggggggcccu

SEQ ID NO: 3028 - RNA, 22 nt, Homo sapiens
cagugcaauguuaaaagggcau

SEQ ID NO: 3029 - RNA, 22 nt, Homo sapiens
augcccuuuuaacauugcacug

SEQ ID NO: 3030 - RNA, 22 nt, Homo sapiens
uucacauugugcuacugucugc

SEQ ID NO: 3031 - RNA, 22 nt, Homo sapiens
gcagacaguagcacaaugugaa

SEQ ID NO: 3032 - RNA, 22 nt, Homo sapiens
ucggauccgucugagcuuggcu

SEQ ID NO: 3033 - RNA, 22 nt, Homo sapiens
agccaagcucagacggauccga

SEQ ID NO: 3034 - RNA, 22 nt, Homo sapiens
cugaagcucagagggcucugau

SEQ ID NO: 3035 - RNA, 22 nt, Homo sapiens
aucagagcccucugagcuucag

SEQ ID NO: 3036 - RNA, 22 nt, Homo sapiens
ccucuuccccuugucucuccag

SEQ ID NO: 3037 - RNA, 22 nt, Homo sapiens
cuggagagacaaggggaagagg

SEQ ID NO: 3038 - RNA, 22 nt, Homo sapiens
ugagugacaggggaaaugggga

SEQ ID NO: 3039 - RNA, 22 nt, Homo sapiens
uccccauuuccccugucacuca

SEQ ID NO: 3040 - RNA, 22 nt, Homo sapiens
ucaggacacuucugaacuugga

SEQ ID NO: 3041 - RNA, 22 nt, Homo sapiens
uccaaguucagaaguguccuga

SEQ ID NO: 3042 - RNA, 22 nt, Homo sapiens
caguucagaaguguuccugagu

SEQ ID NO: 3043 - RNA, 22 nt, Homo sapiens
acucaggaacacuucugaacug

SEQ ID NO: 3044 - RNA, 21 nt, Homo sapiens
uuucccuuuccauccuggcag

SEQ ID NO: 3045 - RNA, 21 nt, Homo sapiens
cugccaggauggaaagggaaa

SEQ ID NO: 3046 - RNA, 21 nt, Homo sapiens
uugccagggcaggagguggaa

SEQ ID NO: 3047 - RNA, 21 nt, Homo sapiens
uuccaccuccugcccuggcaa

SEQ ID NO: 3048 - RNA, 21 nt, Homo sapiens
agagauugguagaaaucaggu

SEQ ID NO: 3049 - RNA, 21 nt, Homo sapiens
accugauuucuaccaaucucu

SEQ ID NO: 3050 - RNA, 23 nt, Homo sapiens
aaucggacccauuuaaaccggag

SEQ ID NO: 3051 - RNA, 23 nt, Homo sapiens
cuccgguuuaaauggguccgauu

SEQ ID NO: 3052 - RNA, 24 nt, Homo sapiens
ucugggcacaggcggauggacagg

SEQ ID NO: 3053 - RNA, 24 nt, Homo sapiens
ccuguccauccgccugugcccaga

SEQ ID NO: 3054 - RNA, 21 nt, Homo sapiens
ccagugacugagcuggagcca

SEQ ID NO: 3055 - RNA, 21 nt, Homo sapiens
uggcuccagcucagucacugg

SEQ ID NO: 3056 - RNA, 22 nt, Homo sapiens
aggauaggaagaaugaagugcu

SEQ ID NO: 3057 - RNA, 22 nt, Homo sapiens
agcacuucauucuuccuauccu

SEQ ID NO: 3058 - RNA, 22 nt, Homo sapiens
aggagaguggauuccagguggu

SEQ ID NO: 3059 - RNA, 22 nt, Homo sapiens
accaccuggaauccacucuccu

SEQ ID NO: 3060 - RNA, 22 nt, Homo sapiens
uccuccucuaccucaucccagu

SEQ ID NO: 3061 - RNA, 22 nt, Homo sapiens
acugggaugagguagaggagga

SEQ ID NO: 3062 - RNA, 22 nt, Homo sapiens
ugagggguuuggaaugggaugg

SEQ ID NO: 3063 - RNA, 22 nt, Homo sapiens
ccaucccauuccaaaccccuca

SEQ ID NO: 3064 - RNA, 21 nt, Homo sapiens
auccaguucucugagggggcu

SEQ ID NO: 3065 - RNA, 21 nt, Homo sapiens
agcccccucagagaacuggau

SEQ ID NO: 3066 - RNA, 22 nt, Homo sapiens
aaccccuaaggcaacuggaugg

SEQ ID NO: 3067 - RNA, 22 nt, Homo sapiens
ccauccaguugccuuagggguu

SEQ ID NO: 3068 - RNA, 21 nt, Homo sapiens
ucauccucgucucccucccag

SEQ ID NO: 3069 - RNA, 21 nt, Homo sapiens
cugggagggagacgaggauga

SEQ ID NO: 3070 - RNA, 22 nt, Homo sapiens
agggaaggggacgaggguuggg

SEQ ID NO: 3071 - RNA, 22 nt, Homo sapiens
cccaacccucguccccuucccu

SEQ ID NO: 3072 - RNA, 23 nt, Homo sapiens
aagaagagacugagucaucgaau

SEQ ID NO: 3073 - RNA, 23 nt, Homo sapiens
auucgaugacucagucucuucuu

SEQ ID NO: 3074 - RNA, 23 nt, Homo sapiens
caauggcacaaacucauucuuga

SEQ ID NO: 3075 - RNA, 23 nt, Homo sapiens
ucaagaaugaguuugugccauug

SEQ ID NO: 3076 - RNA, 21 nt, Homo sapiens
acugaauccucuuuuccucag

SEQ ID NO: 3077 - RNA, 21 nt, Homo sapiens
cugaggaaaagaggauucagu

SEQ ID NO: 3078 - RNA, 22 nt, Homo sapiens
ugggaugagggauugaagugga

SEQ ID NO: 3079 - RNA, 22 nt, Homo sapiens
uccacuucaaucccucauccca

SEQ ID NO: 3080 - RNA, 22 nt, Homo sapiens
caggccauauugugcugccuca

SEQ ID NO: 3081 - RNA, 22 nt, Homo sapiens
ugaggcagcacaauauggccug

SEQ ID NO: 3082 - RNA, 22 nt, Homo sapiens
uagcagcacauaaugguuugug

SEQ ID NO: 3083 - RNA, 22 nt, Homo sapiens
cacaaaccauuaugugcugcua

SEQ ID NO: 3084 - RNA, 22 nt, Homo sapiens
cgaaucauuauuugcugcucua

SEQ ID NO: 3085 - RNA, 22 nt, Homo sapiens
uagagcagcaaauaaugauucg

SEQ ID NO: 3086 - RNA, 22 nt, Homo sapiens
uagcagcacaucaugguuuaca

SEQ ID NO: 3087 - RNA, 22 nt, Homo sapiens
uguaaaccaugaugugcugcua

SEQ ID NO: 3088 - RNA, 22 nt, Homo sapiens
ccaauauuacugugcugcuuua

SEQ ID NO: 3089 - RNA, 22 nt, Homo sapiens
uaaagcagcacaguaauauugg

SEQ ID NO: 3090 - RNA, 22 nt, Homo sapiens
cuagguauggucccagggaucc

SEQ ID NO: 3091 - RNA, 22 nt, Homo sapiens
ggaucccugggaccauaccuag

SEQ ID NO: 3092 - RNA, 20 nt, Homo sapiens
guguguggaaaugcuucugc

SEQ ID NO: 3093 - RNA, 20 nt, Homo sapiens
gcagaagcauuuccacacac

SEQ ID NO: 3094 - RNA, 22 nt, Homo sapiens
gugugcggaaaugcuucugcua

SEQ ID NO: 3095 - RNA, 22 nt, Homo sapiens
uagcagaagcauuuccgcacac

SEQ ID NO: 3096 - RNA, 23 nt, Homo sapiens
agcagcauuguacagggcuauca

SEQ ID NO: 3097 - RNA, 23 nt, Homo sapiens
ugauagcccuguacaaugcugcu

SEQ ID NO: 3098 - RNA, 22 nt, Homo sapiens
aacuggcccucaaagucccgcu

SEQ ID NO: 3099 - RNA, 22 nt, Homo sapiens
agcgggacuuugagggccaguu

SEQ ID NO: 3100 - RNA, 22 nt, Homo sapiens
cgggguuuugagggcgagauga

SEQ ID NO: 3101 - RNA, 22 nt, Homo sapiens
ucaucucgcccucaaaaccccg

SEQ ID NO: 3102 - RNA, 21 nt, Homo sapiens
gcagggacagcaaaggggugc

SEQ ID NO: 3103 - RNA, 21 nt, Homo sapiens
gcaccccuuugcugucccugc

SEQ ID NO: 3104 - RNA, 22 nt, Homo sapiens
uucccuuugucauccuucgccu

SEQ ID NO: 3105 - RNA, 22 nt, Homo sapiens
aggcgaaggaugacaaagggaa

SEQ ID NO: 3106 - RNA, 23 nt, Homo sapiens
auggccaaaacugcaguuauuuu

SEQ ID NO: 3107 - RNA, 23 nt, Homo sapiens
aaaauaacugcaguuuuggccau

SEQ ID NO: 3108 - RNA, 25 nt, Homo sapiens
aaaaaccacaauuacuuuugcacca

SEQ ID NO: 3109 - RNA, 25 nt, Homo sapiens
uggugcaaaaguaauugugguuuuu

SEQ ID NO: 3110 - RNA, 21 nt, Homo sapiens
caaaagugaucgugguuuuug

SEQ ID NO: 3111 - RNA, 21 nt, Homo sapiens
caaaaaccacgaucacuuuug

SEQ ID NO: 3112 - RNA, 23 nt, Homo sapiens
caaagacugcaauuacuuuugcg

SEQ ID NO: 3113 - RNA, 23 nt, Homo sapiens
cgcaaaaguaauugcagucuuug

SEQ ID NO: 3114 - RNA, 23 nt, Homo sapiens
aaaaguaacugcgguuuuugccu

SEQ ID NO: 3115 - RNA, 23 nt, Homo sapiens
aggcaaaaaccgcaguuacuuuu

SEQ ID NO: 3116 - RNA, 22 nt, Homo sapiens
ugccuggaacauaguagggacu

SEQ ID NO: 3117 - RNA, 22 nt, Homo sapiens
agucccuacuauguuccaggca

SEQ ID NO: 3118 - RNA, 21 nt, Homo sapiens
auaggacucauauagugccag

SEQ ID NO: 3119 - RNA, 21 nt, Homo sapiens
cuggcacuauaugaguccuau

SEQ ID NO: 3120 - RNA, 20 nt, Homo sapiens
agacacuauacgagucauau

SEQ ID NO: 3121 - RNA, 20 nt, Homo sapiens
auaugacucguauagugucu

SEQ ID NO: 3122 - RNA, 23 nt, Homo sapiens
ugugacugcauuaugaaaauucu

SEQ ID NO: 3123 - RNA, 23 nt, Homo sapiens
agaauuuucauaaugcagucaca

SEQ ID NO: 3124 - RNA, 20 nt, Homo sapiens
uggcuuuuaacuuugauggc

SEQ ID NO: 3125 - RNA, 20 nt, Homo sapiens
gccaucaaaguuaaaagcca

SEQ ID NO: 3126 - RNA, 21 nt, Homo sapiens
cacagcaaguguagacaggca

SEQ ID NO: 3127 - RNA, 21 nt, Homo sapiens
ugccugucuacacuugcugug

SEQ ID NO: 3128 - RNA, 21 nt, Homo sapiens
ccugucugugccugcuguaca

SEQ ID NO: 3129 - RNA, 21 nt, Homo sapiens
uguacagcaggcacagacagg

SEQ ID NO: 3130 - RNA, 22 nt, Homo sapiens
uaaauagaguaggcaaaggaca

SEQ ID NO: 3131 - RNA, 22 nt, Homo sapiens
uguccuuugccuacucuauuua

SEQ ID NO: 3132 - RNA, 22 nt, Homo sapiens
uccuuugccuauucuauuuaag

SEQ ID NO: 3133 - RNA, 22 nt, Homo sapiens
cuuaaauagaauaggcaaagga

SEQ ID NO: 3134 - RNA, 22 nt, Homo sapiens
guugggacaagaggacggucuu

SEQ ID NO: 3135 - RNA, 22 nt, Homo sapiens
aagaccguccucuugucccaac

SEQ ID NO: 3136 - RNA, 17 nt, Homo sapiens
cagagaauuguuuaauc

SEQ ID NO: 3137 - RNA, 17 nt, Homo sapiens
gauuaaacaauucucug

SEQ ID NO: 3138 - RNA, 20 nt, Homo sapiens
uagaggaagcuguggagaga

SEQ ID NO: 3139 - RNA, 20 nt, Homo sapiens
ucucuccacagcuuccucua

SEQ ID NO: 3140 - RNA, 22 nt, Homo sapiens
uccccuucugcaggccugcugg

SEQ ID NO: 3141 - RNA, 22 nt, Homo sapiens
ccagcaggccugcagaagggga

SEQ ID NO: 3142 - RNA, 23 nt, Homo sapiens
aucagggcuuguggaaugggaag

SEQ ID NO: 3143 - RNA, 23 nt, Homo sapiens
cuucccauuccacaagcccugau

SEQ ID NO: 3144 - RNA, 23 nt, Homo sapiens
ucuggcaaguaaaaaacucucau

SEQ ID NO: 3145 - RNA, 23 nt, Homo sapiens
augagaguuuuuuacuugccaga

SEQ ID NO: 3146 - RNA, 23 nt, Homo sapiens
ucgaggacugguggaagggccuu

SEQ ID NO: 3147 - RNA, 23 nt, Homo sapiens
aaggcccuuccaccaguccucga

SEQ ID NO: 3148 - RNA, 24 nt, Homo sapiens
uggguagagaaggagcucagagga

SEQ ID NO: 3149 - RNA, 24 nt, Homo sapiens
uccucugagcuccuucucuaccca

SEQ ID NO: 3150 - RNA, 22 nt, Homo sapiens
uaaagaacucuuaaaacccaau

SEQ ID NO: 3151 - RNA, 22 nt, Homo sapiens
auuggguuuuaagaguucuuua

SEQ ID NO: 3152 - RNA, 23 nt, Homo sapiens
ugauggauaaaagacuacauauu

SEQ ID NO: 3153 - RNA, 23 nt, Homo sapiens
aauauguagucuuuuauccauca

SEQ ID NO: 3154 - RNA, 22 nt, Homo sapiens
ugccuaggcugagacugcagug

SEQ ID NO: 3155 - RNA, 22 nt, Homo sapiens
cacugcagucucagccuaggca

SEQ ID NO: 3156 - RNA, 22 nt, Homo sapiens
uggcccaaccuauucaguuagu

SEQ ID NO: 3157 - RNA, 22 nt, Homo sapiens
acuaacugaauagguugggcca

SEQ ID NO: 3158 - RNA, 23 nt, Homo sapiens
cugacugaauagguagggucauu

SEQ ID NO: 3159 - RNA, 23 nt, Homo sapiens
aaugacccuaccuauucagucag

SEQ ID NO: 3160 - RNA, 24 nt, Homo sapiens
ucuguagccugggagcaauggggu

SEQ ID NO: 3161 - RNA, 24 nt, Homo sapiens
accccauugcucccaggcuacaga

SEQ ID NO: 3162 - RNA, 23 nt, Homo sapiens
uaggagcucaacagaugccuguu

SEQ ID NO: 3163 - RNA, 23 nt, Homo sapiens
aacaggcaucuguugagcuccua

SEQ ID NO: 3164 - RNA, 19 nt, Homo sapiens
gagggcggguggaggagga

SEQ ID NO: 3165 - RNA, 19 nt, Homo sapiens
uccuccuccacccgcccuc

SEQ ID NO: 3166 - RNA, 25 nt, Homo sapiens
auaacauuguaaagcgcuucuuucg

SEQ ID NO: 3167 - RNA, 25 nt, Homo sapiens
cgaaagaagcgcuuuacaauguuau

SEQ ID NO: 3168 - RNA, 24 nt, Homo sapiens
agauauuuugaguguuuggaauug

SEQ ID NO: 3169 - RNA, 24 nt, Homo sapiens
caauuccaaacacucaaaauaucu

SEQ ID NO: 3170 - RNA, 22 nt, Homo sapiens
aacuccaaacacucaaaacuca

SEQ ID NO: 3171 - RNA, 22 nt, Homo sapiens
ugaguuuugaguguuuggaguu

SEQ ID NO: 3172 - RNA, 22 nt, Homo sapiens
caugcuaggauagaaagaaugg

SEQ ID NO: 3173 - RNA, 22 nt, Homo sapiens
ccauucuuucuauccuagcaug

SEQ ID NO: 3174 - RNA, 24 nt, Homo sapiens
gguugggcagugaggaggguguga

SEQ ID NO: 3175 - RNA, 24 nt, Homo sapiens
ucacacccuccucacugcccaacc

SEQ ID NO: 3176 - RNA, 22 nt, Homo sapiens
uggaaaaaacuggugugugcuu

SEQ ID NO: 3177 - RNA, 22 nt, Homo sapiens
aagcacacaccaguuuuuucca

SEQ ID NO: 3178 - RNA, 22 nt, Homo sapiens
cuggggagauccucgagguugg

SEQ ID NO: 3179 - RNA, 22 nt, Homo sapiens
ccaaccucgaggaucuccccag

SEQ ID NO: 3180 - RNA, 22 nt, Homo sapiens
caaccucgacgaucuccucagc

SEQ ID NO: 3181 - RNA, 22 nt, Homo sapiens
gcugaggagaucgucgagguug

SEQ ID NO: 3182 - RNA, 21 nt, Homo sapiens
ugaggagaucgucgagguugg

SEQ ID NO: 3183 - RNA, 21 nt, Homo sapiens
ccaaccucgacgaucuccuca

SEQ ID NO: 3184 - RNA, 22 nt, Homo sapiens
caaccucgaggaucuccccagc

SEQ ID NO: 3185 - RNA, 22 nt, Homo sapiens
gcuggggagauccucgagguug

SEQ ID NO: 3186 - RNA, 21 nt, Homo sapiens
gguggggcaaugggaucaggu

SEQ ID NO: 3187 - RNA, 21 nt, Homo sapiens
accugaucccauugccccacc

SEQ ID NO: 3188 - RNA, 23 nt, Homo sapiens
ggggaaagcgaguagggacauuu

SEQ ID NO: 3189 - RNA, 23 nt, Homo sapiens
aaaugucccuacucgcuuucccc

SEQ ID NO: 3190 - RNA, 22 nt, Homo sapiens
cagaaggggaguugggagcaga

SEQ ID NO: 3191 - RNA, 22 nt, Homo sapiens
ucugcucccaacuccccuucug

SEQ ID NO: 3192 - RNA, 21 nt, Homo sapiens
ccaggcucugcagugggaacu

SEQ ID NO: 3193 - RNA, 21 nt, Homo sapiens
aguucccacugcagagccugg

SEQ ID NO: 3194 - RNA, 21 nt, Homo sapiens
cucccacuuccagaucuuucu

SEQ ID NO: 3195 - RNA, 21 nt, Homo sapiens
agaaagaucuggaagugggag

SEQ ID NO: 3196 - RNA, 22 nt, Homo sapiens
aaagaucuggaagugggagaca

SEQ ID NO: 3197 - RNA, 22 nt, Homo sapiens
ugucucccacuuccagaucuuu

SEQ ID NO: 3198 - RNA, 22 nt, Homo sapiens
cugcccuagucuagcugaagcu

SEQ ID NO: 3199 - RNA, 22 nt, Homo sapiens
agcuucagcuagacuagggcag

SEQ ID NO: 3200 - RNA, 22 nt, Homo sapiens
uucagccaggcuagugcagucu

SEQ ID NO: 3201 - RNA, 22 nt, Homo sapiens
agacugcacuagccuggcugaa

SEQ ID NO: 3202 - RNA, 22 nt, Homo sapiens
uaggauuacaagugucggccac

SEQ ID NO: 3203 - RNA, 22 nt, Homo sapiens
guggccgacacuuguaauccua

SEQ ID NO: 3204 - RNA, 22 nt, Homo sapiens
agagcugagacuagaaagccca

SEQ ID NO: 3205 - RNA, 22 nt, Homo sapiens
ugggcuuucuagucucagcucu

SEQ ID NO: 3206 - RNA, 22 nt, Homo sapiens
ggcuuucuagucucagcucucc

SEQ ID NO: 3207 - RNA, 22 nt, Homo sapiens
ggagagcugagacuagaaagcc

SEQ ID NO: 3208 - RNA, 23 nt, Homo sapiens
cugauaagaacagaggcccagau

SEQ ID NO: 3209 - RNA, 23 nt, Homo sapiens
aucugggccucuguucuuaucag

SEQ ID NO: 3210 - RNA, 21 nt, Homo sapiens
ucccuaccccuccacucccca

SEQ ID NO: 3211 - RNA, 21 nt, Homo sapiens
uggggaguggagggguaggga

SEQ ID NO: 3212 - RNA, 23 nt, Homo sapiens
uuagggaguagaaggguggggag

SEQ ID NO: 3213 - RNA, 23 nt, Homo sapiens
cuccccacccuucuacucccuaa

SEQ ID NO: 3214 - RNA, 22 nt, Homo sapiens
uauaaaaugagggcaguaagac

SEQ ID NO: 3215 - RNA, 22 nt, Homo sapiens
gucuuacugcccucauuuuaua

SEQ ID NO: 3216 - RNA, 22 nt, Homo sapiens
ugugacuuuaagggaaauggcg

SEQ ID NO: 3217 - RNA, 22 nt, Homo sapiens
cgccauuucccuuaaagucaca

SEQ ID NO: 3218 - RNA, 22 nt, Homo sapiens
agguggaugcaaugugaccuca

SEQ ID NO: 3219 - RNA, 22 nt, Homo sapiens
ugaggucacauugcauccaccu

SEQ ID NO: 3220 - RNA, 23 nt, Homo sapiens
cgcagacaaugccuacuggccua

SEQ ID NO: 3221 - RNA, 23 nt, Homo sapiens
uaggccaguaggcauugucugcg

SEQ ID NO: 3222 - RNA, 17 nt, Homo sapiens
gaguucuacagucagac

SEQ ID NO: 3223 - RNA, 17 nt, Homo sapiens
gucugacuguagaacuc

SEQ ID NO: 3224 - RNA, 22 nt, Homo sapiens
uaggacugugcuuggcacauag

SEQ ID NO: 3225 - RNA, 22 nt, Homo sapiens
cuaugugccaagcacaguccua

SEQ ID NO: 3226 - RNA, 22 nt, Homo sapiens
cugggguucugagacagacagu

SEQ ID NO: 3227 - RNA, 22 nt, Homo sapiens
acugucugucucagaaccccag

SEQ ID NO: 3228 - RNA, 22 nt, Homo sapiens
aaaggaggaaauaggcaggcca

SEQ ID NO: 3229 - RNA, 22 nt, Homo sapiens
uggccugccuauuuccuccuuu

SEQ ID NO: 3230 - RNA, 22 nt, Homo sapiens
ugcccugccuguuuucuccuuu

SEQ ID NO: 3231 - RNA, 22 nt, Homo sapiens
aaaggagaaaacaggcagggca

SEQ ID NO: 3232 - RNA, 23 nt, Homo sapiens
uagugaguuagagaugcagagcc

SEQ ID NO: 3233 - RNA, 23 nt, Homo sapiens
ggcucugcaucucuaacucacua

SEQ ID NO: 3234 - RNA, 19 nt, Homo sapiens
acuggccugggacuaccgg

SEQ ID NO: 3235 - RNA, 19 nt, Homo sapiens
ccgguagucccaggccagu

SEQ ID NO: 3236 - RNA, 21 nt, Homo sapiens
ugcacggcacuggggacacgu

SEQ ID NO: 3237 - RNA, 21 nt, Homo sapiens
acguguccccagugccgugca

SEQ ID NO: 3238 - RNA, 23 nt, Homo sapiens
uguguacacacgugccaggcgcu

SEQ ID NO: 3239 - RNA, 23 nt, Homo sapiens
agcgccuggcacguguguacaca

SEQ ID NO: 3240 - RNA, 17 nt, Homo sapiens
ggggcgcggccggaucg

SEQ ID NO: 3241 - RNA, 17 nt, Homo sapiens
cgauccggccgcgcccc

SEQ ID NO: 3242 - RNA, 22 nt, Homo sapiens
agaaggggugaaauuuaaacgu

SEQ ID NO: 3243 - RNA, 22 nt, Homo sapiens
acguuuaaauuucaccccuucu

SEQ ID NO: 3244 - RNA, 19 nt, Homo sapiens
aucgggcccucggcgccgg

SEQ ID NO: 3245 - RNA, 19 nt, Homo sapiens
ccggcgccgagggcccgau

SEQ ID NO: 3246 - RNA, 17 nt, Homo sapiens
gcuucuguaguguaguc

SEQ ID NO: 3247 - RNA, 17 nt, Homo sapiens
gacuacacuacagaagc

SEQ ID NO: 3248 - RNA, 22 nt, Homo sapiens
gccucucucggagucgcucgga

SEQ ID NO: 3249 - RNA, 22 nt, Homo sapiens
uccgagcgacuccgagagaggc

SEQ ID NO: 3250 - RNA, 23 nt, Homo sapiens
aaagucucgcucucugccccuca

SEQ ID NO: 3251 - RNA, 23 nt, Homo sapiens
ugaggggcagagagcgagacuuu

SEQ ID NO: 3252 - RNA, 24 nt, Homo sapiens
ugaggggccucagaccgagcuuuu

SEQ ID NO: 3253 - RNA, 24 nt, Homo sapiens
aaaagcucggucugaggccccuca

SEQ ID NO: 3254 - RNA, 23 nt, Homo sapiens
agaagaaggcggucggucugcgg

SEQ ID NO: 3255 - RNA, 23 nt, Homo sapiens
ccgcagaccgaccgccuucuucu

SEQ ID NO: 3256 - RNA, 20 nt, Homo sapiens
uuggccauggggcugcgcgg

SEQ ID NO: 3257 - RNA, 20 nt, Homo sapiens
ccgcgcagccccauggccaa

SEQ ID NO: 3258 - RNA, 23 nt, Homo sapiens
ccugggcagcguguggcugaagg

SEQ ID NO: 3259 - RNA, 23 nt, Homo sapiens
ccuucagccacacgcugcccagg

SEQ ID NO: 3260 - RNA, 23 nt, Homo sapiens
agaggcuuugugcggauacgggg

SEQ ID NO: 3261 - RNA, 23 nt, Homo sapiens
ccccguauccgcacaaagccucu

SEQ ID NO: 3262 - RNA, 21 nt, Homo sapiens
cccuugggucugaugggguag

SEQ ID NO: 3263 - RNA, 21 nt, Homo sapiens
cuaccccaucagacccaaggg

SEQ ID NO: 3264 - RNA, 25 nt, Homo sapiens
ugccccaucugugcccuggguagga

SEQ ID NO: 3265 - RNA, 25 nt, Homo sapiens
uccuacccagggcacagauggggca

SEQ ID NO: 3266 - RNA, 23 nt, Homo sapiens
uguggaagguagacggccagaga

SEQ ID NO: 3267 - RNA, 23 nt, Homo sapiens
ucucuggccgucuaccuuccaca

SEQ ID NO: 3268 - RNA, 20 nt, Homo sapiens
ucuggccagcuacgucccca

SEQ ID NO: 3269 - RNA, 20 nt, Homo sapiens
uggggacguagcuggccaga

SEQ ID NO: 3270 - RNA, 23 nt, Homo sapiens
uggggacguagcuggccagacag

SEQ ID NO: 3271 - RNA, 23 nt, Homo sapiens
cugucuggccagcuacgucccca

SEQ ID NO: 3272 - RNA, 22 nt, Homo sapiens
cucucuggccgucuaccuucca

SEQ ID NO: 3273 - RNA, 22 nt, Homo sapiens
uggaagguagacggccagagag

SEQ ID NO: 3274 - RNA, 23 nt, Homo sapiens
ucugggagguuguagcaguggaa

SEQ ID NO: 3275 - RNA, 23 nt, Homo sapiens
uuccacugcuacaaccucccaga

SEQ ID NO: 3276 - RNA, 22 nt, Homo sapiens
uccugcguaggaucugaggagu

SEQ ID NO: 3277 - RNA, 22 nt, Homo sapiens
acuccucagauccuacgcagga

SEQ ID NO: 3278 - RNA, 22 nt, Homo sapiens
agcucugcugcucacuggcagu

SEQ ID NO: 3279 - RNA, 22 nt, Homo sapiens
acugccagugagcagcagagcu

SEQ ID NO: 3280 - RNA, 21 nt, Homo sapiens
ggccagccaccaggagggcug

SEQ ID NO: 3281 - RNA, 21 nt, Homo sapiens
cagcccuccugguggcuggcc

SEQ ID NO: 3282 - RNA, 17 nt, Homo sapiens
cgcgccgggcccggguu

SEQ ID NO: 3283 - RNA, 17 nt, Homo sapiens
aacccgggcccggcgcg

SEQ ID NO: 3284 - RNA, 23 nt, Homo sapiens
ggaggcgcaggcucggaaaggcg

SEQ ID NO: 3285 - RNA, 23 nt, Homo sapiens
cgccuuuccgagccugcgccucc

SEQ ID NO: 3286 - RNA, 22 nt, Homo sapiens
guggaguccuggggaauggaga

SEQ ID NO: 3287 - RNA, 22 nt, Homo sapiens
ucuccauuccccaggacuccac

SEQ ID NO: 3288 - RNA, 23 nt, Homo sapiens
agggacugccuuaggagaaaguu

SEQ ID NO: 3289 - RNA, 23 nt, Homo sapiens
aacuuucuccuaaggcagucccu

SEQ ID NO: 3290 - RNA, 17 nt, Homo sapiens
gggauaugaagaaaaau

SEQ ID NO: 3291 - RNA, 17 nt, Homo sapiens
auuuuucuucauauccc

SEQ ID NO: 3292 - RNA, 22 nt, Homo sapiens
uggaagggagaagagcuuuaau

SEQ ID NO: 3293 - RNA, 22 nt, Homo sapiens
auuaaagcucuucucccuucca

SEQ ID NO: 3294 - RNA, 22 nt, Homo sapiens
acuuuccucacucccgugaagu

SEQ ID NO: 3295 - RNA, 22 nt, Homo sapiens
acuucacgggagugaggaaagu

SEQ ID NO: 3296 - RNA, 21 nt, Homo sapiens
uucgcgggcgaaggcaaaguc

SEQ ID NO: 3297 - RNA, 21 nt, Homo sapiens
gacuuugccuucgcccgcgaa

SEQ ID NO: 3298 - RNA, 22 nt, Homo sapiens
caucuggcauccgucacacaga

SEQ ID NO: 3299 - RNA, 22 nt, Homo sapiens
ucugugugacggaugccagaug

SEQ ID NO: 3300 - RNA, 22 nt, Homo sapiens
ugagggacagaugccagaagca

SEQ ID NO: 3301 - RNA, 22 nt, Homo sapiens
ugcuucuggcaucugucccuca

SEQ ID NO: 3302 - RNA, 22 nt, Homo sapiens
aaacuaaucucuacacugcugc

SEQ ID NO: 3303 - RNA, 22 nt, Homo sapiens
gcagcaguguagagauuaguuu

SEQ ID NO: 3304 - RNA, 22 nt, Homo sapiens
gcaguaguguagagauugguuu

SEQ ID NO: 3305 - RNA, 22 nt, Homo sapiens
aaaccaaucucuacacuacugc

SEQ ID NO: 3306 - RNA, 21 nt, Homo sapiens
gcugcaccggagacuggguaa

SEQ ID NO: 3307 - RNA, 21 nt, Homo sapiens
uuacccagucuccggugcagc

SEQ ID NO: 3308 - RNA, 21 nt, Homo sapiens
uacccagucuccggugcagcc

SEQ ID NO: 3309 - RNA, 21 nt, Homo sapiens
ggcugcaccggagacugggua

SEQ ID NO: 3310 - RNA, 24 nt, Homo sapiens
uguggacagugagguagagggagu

SEQ ID NO: 3311 - RNA, 24 nt, Homo sapiens
acucccucuaccucacuguccaca

SEQ ID NO: 3312 - RNA, 22 nt, Homo sapiens
agcuuuugggaauucagguagu

SEQ ID NO: 3313 - RNA, 22 nt, Homo sapiens
acuaccugaauucccaaaagcu

SEQ ID NO: 3314 - RNA, 21 nt, Homo sapiens
accugaauuaccaaaagcuuu

SEQ ID NO: 3315 - RNA, 21 nt, Homo sapiens
aaagcuuuugguaauucaggu

SEQ ID NO: 3316 - RNA, 22 nt, Homo sapiens
auauaccuguucggucucuuua

SEQ ID NO: 3317 - RNA, 22 nt, Homo sapiens
uaaagagaccgaacagguauau

SEQ ID NO: 3318 - RNA, 22 nt, Homo sapiens
aggggaccaaagagauauauag

SEQ ID NO: 3319 - RNA, 22 nt, Homo sapiens
cuauauaucucuuugguccccu

SEQ ID NO: 3320 - RNA, 23 nt, Homo sapiens
uuuguauggauauguguguguau

SEQ ID NO: 3321 - RNA, 23 nt, Homo sapiens
auacacacacauauccauacaaa

SEQ ID NO: 3322 - RNA, 22 nt, Homo sapiens
uguguuagaauaggggcaauaa

SEQ ID NO: 3323 - RNA, 22 nt, Homo sapiens
uuauugccccuauucuaacaca

SEQ ID NO: 3324 - RNA, 22 nt, Homo sapiens
auugccucuguucuaacacaag

SEQ ID NO: 3325 - RNA, 22 nt, Homo sapiens
cuuguguuagaacagaggcaau

SEQ ID NO: 3326 - RNA, 22 nt, Homo sapiens
aagggcuuccucucugcaggac

SEQ ID NO: 3327 - RNA, 22 nt, Homo sapiens
guccugcagagaggaagcccuu

SEQ ID NO: 3328 - RNA, 21 nt, Homo sapiens
ccugcagagaggaagcccuuc

SEQ ID NO: 3329 - RNA, 21 nt, Homo sapiens
gaagggcuuccucucugcagg

SEQ ID NO: 3330 - RNA, 22 nt, Homo sapiens
aggauuucagaaauacuggugu

SEQ ID NO: 3331 - RNA, 22 nt, Homo sapiens
acaccaguauuucugaaauccu

SEQ ID NO: 3332 - RNA, 24 nt, Homo sapiens
agauguauggaaucuguauauauc

SEQ ID NO: 3333 - RNA, 24 nt, Homo sapiens
gauauauacagauuccauacaucu

SEQ ID NO: 3334 - RNA, 22 nt, Homo sapiens
cggggagagaacgcagugacgu

SEQ ID NO: 3335 - RNA, 22 nt, Homo sapiens
acgucacugcguucucuccccg

SEQ ID NO: 3336 - RNA, 19 nt, Homo sapiens
uggggcggagcuuccggag

SEQ ID NO: 3337 - RNA, 19 nt, Homo sapiens
cuccggaagcuccgcccca

SEQ ID NO: 3338 - RNA, 21 nt, Homo sapiens
ucacgcggagagauggcuuug

SEQ ID NO: 3339 - RNA, 21 nt, Homo sapiens
caaagccaucucuccgcguga

SEQ ID NO: 3340 - RNA, 22 nt, Homo sapiens
caggcgucugucuacguggcuu

SEQ ID NO: 3341 - RNA, 22 nt, Homo sapiens
aagccacguagacagacgccug

SEQ ID NO: 3342 - RNA, 22 nt, Homo sapiens
caccuugcgcuacucaggucug

SEQ ID NO: 3343 - RNA, 22 nt, Homo sapiens
cagaccugaguagcgcaaggug

SEQ ID NO: 3344 - RNA, 22 nt, Homo sapiens
aaucugagaaggcgcacaaggu

SEQ ID NO: 3345 - RNA, 22 nt, Homo sapiens
accuugugcgccuucucagauu

SEQ ID NO: 3346 - RNA, 22 nt, Homo sapiens
aaggccuuucugaaccuucaga

SEQ ID NO: 3347 - RNA, 22 nt, Homo sapiens
ucugaagguucagaaaggccuu

SEQ ID NO: 3348 - RNA, 22 nt, Homo sapiens
gugacaucacauauacggcagc

SEQ ID NO: 3349 - RNA, 22 nt, Homo sapiens
gcugccguauaugugaugucac

SEQ ID NO: 3350 - RNA, 24 nt, Homo sapiens
ucagaacaaaugccgguucccaga

SEQ ID NO: 3351 - RNA, 24 nt, Homo sapiens
ucugggaaccggcauuuguucuga

SEQ ID NO: 3352 - RNA, 22 nt, Homo sapiens
ugagaaccacgucugcucugag

SEQ ID NO: 3353 - RNA, 22 nt, Homo sapiens
cucagagcagacgugguucuca

SEQ ID NO: 3354 - RNA, 17 nt, Homo sapiens
ucauauugcuucuuucu

SEQ ID NO: 3355 - RNA, 17 nt, Homo sapiens
agaaagaagcaauauga

SEQ ID NO: 3356 - RNA, 22 nt, Homo sapiens
ugugacagauugauaacugaaa

SEQ ID NO: 3357 - RNA, 22 nt, Homo sapiens
uuucaguuaucaaucugucaca

SEQ ID NO: 3358 - RNA, 23 nt, Homo sapiens
uggaguccaggaaucugcauuuu

SEQ ID NO: 3359 - RNA, 23 nt, Homo sapiens
aaaaugcagauuccuggacucca

SEQ ID NO: 3360 - RNA, 22 nt, Homo sapiens
aagcccuuaccccaaaaaguau

SEQ ID NO: 3361 - RNA, 22 nt, Homo sapiens
auacuuuuugggguaagggcuu

SEQ ID NO: 3362 - RNA, 22 nt, Homo sapiens
aagcccuuaccccaaaaagcau

SEQ ID NO: 3363 - RNA, 22 nt, Homo sapiens
augcuuuuugggguaagggcuu

SEQ ID NO: 3364 - RNA, 22 nt, Homo sapiens
uggaauguaaggaagugugugg

SEQ ID NO: 3365 - RNA, 22 nt, Homo sapiens
ccacacacuuccuuacauucca

SEQ ID NO: 3366 - RNA, 22 nt, Homo sapiens
cuuaucagauuguauuguaauu

SEQ ID NO: 3367 - RNA, 22 nt, Homo sapiens
aauuacaauacaaucugauaag

SEQ ID NO: 3368 - RNA, 22 nt, Homo sapiens
uuauaauacaaccugauaagug

SEQ ID NO: 3369 - RNA, 22 nt, Homo sapiens
cacuuaucagguuguauuauaa

SEQ ID NO: 3370 - RNA, 22 nt, Homo sapiens
cuuagcagguuguauuaucauu

SEQ ID NO: 3371 - RNA, 22 nt, Homo sapiens
aaugauaauacaaccugcuaag

SEQ ID NO: 3372 - RNA, 22 nt, Homo sapiens
auauaauacaaccugcuaagug

SEQ ID NO: 3373 - RNA, 22 nt, Homo sapiens
cacuuagcagguuguauuauau

SEQ ID NO: 3374 - RNA, 22 nt, Homo sapiens
cacuuagcagguuguauuauau

SEQ ID NO: 3375 - RNA, 22 nt, Homo sapiens
auauaauacaaccugcuaagug

SEQ ID NO: 3376 - RNA, 22 nt, Homo sapiens
auaauacaaccugcuaagugcu

SEQ ID NO: 3377 - RNA, 22 nt, Homo sapiens
agcacuuagcagguuguauuau

SEQ ID NO: 3378 - RNA, 22 nt, Homo sapiens
uuugguccccuucaaccagcug

SEQ ID NO: 3379 - RNA, 22 nt, Homo sapiens
cagcugguugaaggggaccaaa

SEQ ID NO: 3380 - RNA, 22 nt, Homo sapiens
uuugguccccuucaaccagcua

SEQ ID NO: 3381 - RNA, 22 nt, Homo sapiens
uagcugguugaaggggaccaaa

SEQ ID NO: 3382 - RNA, 22 nt, Homo sapiens
uguaaacauccuugacuggaag

SEQ ID NO: 3383 - RNA, 22 nt, Homo sapiens
cuuccagucaaggauguuuaca

SEQ ID NO: 3384 - RNA, 22 nt, Homo sapiens
ugucaguuugucaaauacccca

SEQ ID NO: 3385 - RNA, 22 nt, Homo sapiens
ugggguauuugacaaacugaca

SEQ ID NO: 3386 - RNA, 22 nt, Homo sapiens
cguguauuugacaagcugaguu

SEQ ID NO: 3387 - RNA, 22 nt, Homo sapiens
aacucagcuugucaaauacacg

SEQ ID NO: 3388 - RNA, 21 nt, Homo sapiens
uucacaguggcuaaguuccgc

SEQ ID NO: 3389 - RNA, 21 nt, Homo sapiens
gcggaacuuagccacugugaa

SEQ ID NO: 3390 - RNA, 22 nt, Homo sapiens
agggcuuagcugcuugugagca

SEQ ID NO: 3391 - RNA, 22 nt, Homo sapiens
ugcucacaagcagcuaagcccu

SEQ ID NO: 3392 - RNA, 21 nt, Homo sapiens
aucacauugccagggauuacc

SEQ ID NO: 3393 - RNA, 21 nt, Homo sapiens
gguaaucccuggcaaugugau

SEQ ID NO: 3394 - RNA, 22 nt, Homo sapiens
uggguuccuggcaugcugauuu

SEQ ID NO: 3395 - RNA, 22 nt, Homo sapiens
aaaucagcaugccaggaaccca

SEQ ID NO: 3396 - RNA, 22 nt, Homo sapiens
cuuucagucggauguuuacagc

SEQ ID NO: 3397 - RNA, 22 nt, Homo sapiens
gcuguaaacauccgacugaaag

SEQ ID NO: 3398 - RNA, 22 nt, Homo sapiens
ugccuacugagcugauaucagu

SEQ ID NO: 3399 - RNA, 22 nt, Homo sapiens
acugauaucagcucaguaggca

SEQ ID NO: 3400 - RNA, 22 nt, Homo sapiens
ugccuacugagcugaaacacag

SEQ ID NO: 3401 - RNA, 22 nt, Homo sapiens
cuguguuucagcucaguaggca

SEQ ID NO: 3402 - RNA, 22 nt, Homo sapiens
uggcucaguucagcaggaacag

SEQ ID NO: 3403 - RNA, 22 nt, Homo sapiens
cuguuccugcugaacugagcca

SEQ ID NO: 3404 - RNA, 21 nt, Homo sapiens
uucacaguggcuaaguucugc

SEQ ID NO: 3405 - RNA, 21 nt, Homo sapiens
gcagaacuuagccacugugaa

SEQ ID NO: 3406 - RNA, 22 nt, Homo sapiens
agagcuuagcugauuggugaac

SEQ ID NO: 3407 - RNA, 22 nt, Homo sapiens
guucaccaaucagcuaagcucu

SEQ ID NO: 3408 - RNA, 23 nt, Homo sapiens
uguaguguuuccuacuuuaugga

SEQ ID NO: 3409 - RNA, 23 nt, Homo sapiens
uccauaaaguaggaaacacuaca

SEQ ID NO: 3410 - RNA, 21 nt, Homo sapiens
cauaaaguagaaagcacuacu

SEQ ID NO: 3411 - RNA, 21 nt, Homo sapiens
aguagugcuuucuacuuuaug

SEQ ID NO: 3412 - RNA, 22 nt, Homo sapiens
ugaaggucuacugugugccagg

SEQ ID NO: 3413 - RNA, 22 nt, Homo sapiens
ccuggcacacaguagaccuuca

SEQ ID NO: 3414 - RNA, 22 nt, Homo sapiens
uuguacaugguaggcuuucauu

SEQ ID NO: 3415 - RNA, 22 nt, Homo sapiens
aaugaaagccuaccauguacaa

SEQ ID NO: 3416 - RNA, 21 nt, Homo sapiens
cuggauggcuccuccaugucu

SEQ ID NO: 3417 - RNA, 21 nt, Homo sapiens
agacauggaggagccauccag

SEQ ID NO: 3418 - RNA, 23 nt, Homo sapiens
ucuuggaguaggucauugggugg

SEQ ID NO: 3419 - RNA, 23 nt, Homo sapiens
ccacccaaugaccuacuccaaga

SEQ ID NO: 3420 - RNA, 22 nt, Homo sapiens
cucaucugcaaagaaguaagug

SEQ ID NO: 3421 - RNA, 22 nt, Homo sapiens
cacuuacuucuuugcagaugag

SEQ ID NO: 3422 - RNA, 22 nt, Homo sapiens
aacuguuugcagaggaaacuga

SEQ ID NO: 3423 - RNA, 22 nt, Homo sapiens
ucaguuuccucugcaaacaguu

SEQ ID NO: 3424 - RNA, 22 nt, Homo sapiens
cuugguucagggagggucccca

SEQ ID NO: 3425 - RNA, 22 nt, Homo sapiens
uggggacccucccugaaccaag

SEQ ID NO: 3426 - RNA, 22 nt, Homo sapiens
aggaccuucccugaaccaagga

SEQ ID NO: 3427 - RNA, 22 nt, Homo sapiens
uccuugguucagggaagguccu

SEQ ID NO: 3428 - RNA, 21 nt, Homo sapiens
accuccugugugcauggauua

SEQ ID NO: 3429 - RNA, 21 nt, Homo sapiens
uaauccaugcacacaggaggu

SEQ ID NO: 3430 - RNA, 22 nt, Homo sapiens
uacccauugcauaucggaguug

SEQ ID NO: 3431 - RNA, 22 nt, Homo sapiens
caacuccgauaugcaaugggua

SEQ ID NO: 3432 - RNA, 18 nt, Homo sapiens
aaagcuggguugagaagg

SEQ ID NO: 3433 - RNA, 18 nt, Homo sapiens
ccuucucaacccagcuuu

SEQ ID NO: 3434 - RNA, 20 nt, Homo sapiens
gguauccguuuggggauggu

SEQ ID NO: 3435 - RNA, 20 nt, Homo sapiens
accauccccaaacggauacc

SEQ ID NO: 3436 - RNA, 22 nt, Homo sapiens
gaaggcagcagugcuccccugu

SEQ ID NO: 3437 - RNA, 22 nt, Homo sapiens
acaggggagcacugcugccuuc

SEQ ID NO: 3438 - RNA, 22 nt, Homo sapiens
ucagugcaucacagaacuuugu

SEQ ID NO: 3439 - RNA, 22 nt, Homo sapiens
acaaaguucugugaugcacuga

SEQ ID NO: 3440 - RNA, 22 nt, Homo sapiens
aaguucuguuauacacucaggc

SEQ ID NO: 3441 - RNA, 22 nt, Homo sapiens
gccugaguguauaacagaacuu

SEQ ID NO: 3442 - RNA, 22 nt, Homo sapiens
cuggcccucucugcccuuccgu

SEQ ID NO: 3443 - RNA, 22 nt, Homo sapiens
acggaagggcagagagggccag

SEQ ID NO: 3444 - RNA, 21 nt, Homo sapiens
cuagacugaagcuccuugagg

SEQ ID NO: 3445 - RNA, 21 nt, Homo sapiens
ccucaaggagcuucagucuag

SEQ ID NO: 3446 - RNA, 21 nt, Homo sapiens
ucgaggagcucacagucuagu

SEQ ID NO: 3447 - RNA, 21 nt, Homo sapiens
acuagacugugagcuccucga

SEQ ID NO: 3448 - RNA, 21 nt, Homo sapiens
cacauuacacggucgaccucu

SEQ ID NO: 3449 - RNA, 21 nt, Homo sapiens
agaggucgaccguguaaugug

SEQ ID NO: 3450 - RNA, 22 nt, Homo sapiens
aggugguccguggcgcguucgc

SEQ ID NO: 3451 - RNA, 22 nt, Homo sapiens
gcgaacgcgccacggaccaccu

SEQ ID NO: 3452 - RNA, 23 nt, Homo sapiens
cgcauccccuagggcauuggugu

SEQ ID NO: 3453 - RNA, 23 nt, Homo sapiens
acaccaaugcccuaggggaugcg

SEQ ID NO: 3454 - RNA, 20 nt, Homo sapiens
ccucugggcccuuccuccag

SEQ ID NO: 3455 - RNA, 20 nt, Homo sapiens
cuggaggaagggcccagagg

SEQ ID NO: 3456 - RNA, 23 nt, Homo sapiens
ccuaguagguguccaguaagugu

SEQ ID NO: 3457 - RNA, 23 nt, Homo sapiens
acacuuacuggacaccuacuagg

SEQ ID NO: 3458 - RNA, 21 nt, Homo sapiens
acggugcuggauguggccuuu

SEQ ID NO: 3459 - RNA, 21 nt, Homo sapiens
aaaggccacauccagcaccgu

SEQ ID NO: 3460 - RNA, 23 nt, Homo sapiens
ucagcaccaggauauuguuggag

SEQ ID NO: 3461 - RNA, 23 nt, Homo sapiens
cuccaacaauauccuggugcuga

SEQ ID NO: 3462 - RNA, 23 nt, Homo sapiens
ucaacaaaaucacugaugcugga

SEQ ID NO: 3463 - RNA, 23 nt, Homo sapiens
uccagcaucagugauuuuguuga

SEQ ID NO: 3464 - RNA, 22 nt, Homo sapiens
aacaauauccuggugcugagug

SEQ ID NO: 3465 - RNA, 22 nt, Homo sapiens
cacucagcaccaggauauuguu

SEQ ID NO: 3466 - RNA, 23 nt, Homo sapiens
ggcagguucucacccucucuagg

SEQ ID NO: 3467 - RNA, 23 nt, Homo sapiens
ccuagagagggugagaaccugcc

SEQ ID NO: 3468 - RNA, 23 nt, Homo sapiens
gacacgggcgacagcugcggccc

SEQ ID NO: 3469 - RNA, 23 nt, Homo sapiens
gggccgcagcugucgcccguguc

SEQ ID NO: 3470 - RNA, 21 nt, Homo sapiens
auguaugugugcaugugcaug

SEQ ID NO: 3471 - RNA, 21 nt, Homo sapiens
caugcacaugcacacauacau

SEQ ID NO: 3472 - RNA, 22 nt, Homo sapiens
uauacaagggcagacucucucu

SEQ ID NO: 3473 - RNA, 22 nt, Homo sapiens
agagagagucugcccuuguaua

SEQ ID NO: 3474 - RNA, 20 nt, Homo sapiens
ggcggcggcggaggcggggg

SEQ ID NO: 3475 - RNA, 20 nt, Homo sapiens
cccccgccuccgccgccgcc

SEQ ID NO: 3476 - RNA, 22 nt, Homo sapiens
gcaggugcucacuuguccuccu

SEQ ID NO: 3477 - RNA, 22 nt, Homo sapiens
aggaggacaagugagcaccugc

SEQ ID NO: 3478 - RNA, 19 nt, Homo sapiens
ggggccuggcggugggcgg

SEQ ID NO: 3479 - RNA, 19 nt, Homo sapiens
ccgcccaccgccaggcccc

SEQ ID NO: 3480 - RNA, 22 nt, Homo sapiens
gcccaaaggugaauuuuuuggg

SEQ ID NO: 3481 - RNA, 22 nt, Homo sapiens
cccaaaaaauucaccuuugggc

SEQ ID NO: 3482 - RNA, 22 nt, Homo sapiens
caaagaauucuccuuuugggcu

SEQ ID NO: 3483 - RNA, 22 nt, Homo sapiens
agcccaaaaggagaauucuuug

SEQ ID NO: 3484 - RNA, 22 nt, Homo sapiens
cugcaauguaagcacuucuuac

SEQ ID NO: 3485 - RNA, 22 nt, Homo sapiens
guaagaagugcuuacauugcag

SEQ ID NO: 3486 - RNA, 23 nt, Homo sapiens
aaaagugcuuacagugcagguag

SEQ ID NO: 3487 - RNA, 23 nt, Homo sapiens
cuaccugcacuguaagcacuuuu

SEQ ID NO: 3488 - RNA, 22 nt, Homo sapiens
acuguaguaugggcacuuccag

SEQ ID NO: 3489 - RNA, 22 nt, Homo sapiens
cuggaagugcccauacuacagu

SEQ ID NO: 3490 - RNA, 23 nt, Homo sapiens
caaagugcucauagugcagguag

SEQ ID NO: 3491 - RNA, 23 nt, Homo sapiens
cuaccugcacuaugagcacuuug

SEQ ID NO: 3492 - RNA, 23 nt, Homo sapiens
gggguauuguuuccgcugccagg

SEQ ID NO: 3493 - RNA, 23 nt, Homo sapiens
ccuggcagcggaaacaauacccc

SEQ ID NO: 3494 - RNA, 23 nt, Homo sapiens
uagcagcgggaacaguucugcag

SEQ ID NO: 3495 - RNA, 23 nt, Homo sapiens
cugcagaacuguucccgcugcua

SEQ ID NO: 3496 - RNA, 21 nt, Homo sapiens
cgagccucaagcaagggacuu

SEQ ID NO: 3497 - RNA, 21 nt, Homo sapiens
aagucccuugcuugaggcucg

SEQ ID NO: 3498 - RNA, 22 nt, Homo sapiens
uagucccuuccuugaagcgguc

SEQ ID NO: 3499 - RNA, 22 nt, Homo sapiens
gaccgcuucaaggaagggacua

SEQ ID NO: 3500 - RNA, 21 nt, Homo sapiens
acuggacuuggagucagaagg

SEQ ID NO: 3501 - RNA, 21 nt, Homo sapiens
ccuucugacuccaaguccagu

SEQ ID NO: 3502 - RNA, 22 nt, Homo sapiens
cuccugacuccagguccugugu

SEQ ID NO: 3503 - RNA, 22 nt, Homo sapiens
acacaggaccuggagucaggag

SEQ ID NO: 3504 - RNA, 22 nt, Homo sapiens
uuuguucguucggcucgcguga

SEQ ID NO: 3505 - RNA, 22 nt, Homo sapiens
ucacgcgagccgaacgaacaaa

SEQ ID NO: 3506 - RNA, 22 nt, Homo sapiens
acggauguuugagcaugugcua

SEQ ID NO: 3507 - RNA, 22 nt, Homo sapiens
uagcacaugcucaaacauccgu

SEQ ID NO: 3508 - RNA, 23 nt, Homo sapiens
ucaaaugcucagacuccuguggu

SEQ ID NO: 3509 - RNA, 23 nt, Homo sapiens
accacaggagucugagcauuuga

SEQ ID NO: 3510 - RNA, 22 nt, Homo sapiens
cggcaacaagaaacugccugag

SEQ ID NO: 3511 - RNA, 22 nt, Homo sapiens
cucaggcaguuucuuguugccg

SEQ ID NO: 3512 - RNA, 22 nt, Homo sapiens
uagguaguuucauguuguuggg

SEQ ID NO: 3513 - RNA, 22 nt, Homo sapiens
cccaacaacaugaaacuaccua

SEQ ID NO: 3514 - RNA, 22 nt, Homo sapiens
caauguuuccacagugcaucac

SEQ ID NO: 3515 - RNA, 22 nt, Homo sapiens
gugaugcacuguggaaacauug

SEQ ID NO: 3516 - RNA, 21 nt, Homo sapiens
gugcauuguaguugcauugca

SEQ ID NO: 3517 - RNA, 21 nt, Homo sapiens
ugcaaugcaacuacaaugcac

SEQ ID NO: 3518 - RNA, 18 nt, Homo sapiens
aucccaccucugccacca

SEQ ID NO: 3519 - RNA, 18 nt, Homo sapiens
ugguggcagaggugggau

SEQ ID NO: 3520 - RNA, 19 nt, Homo sapiens
aucccaccacugccaccau

SEQ ID NO: 3521 - RNA, 19 nt, Homo sapiens
augguggcaguggugggau

SEQ ID NO: 3522 - RNA, 22 nt, Homo sapiens
accuuccucuccaugggucuuu

SEQ ID NO: 3523 - RNA, 22 nt, Homo sapiens
aaagacccauggagaggaaggu

SEQ ID NO: 3524 - RNA, 22 nt, Homo sapiens
aaagacccauugaggagaaggu

SEQ ID NO: 3525 - RNA, 22 nt, Homo sapiens
accuucuccucaaugggucuuu

SEQ ID NO: 3526 - RNA, 21 nt, Homo sapiens
aauguagagauugaucaaaau

SEQ ID NO: 3527 - RNA, 21 nt, Homo sapiens
auuuugaucaaucucuacauu

SEQ ID NO: 3528 - RNA, 23 nt, Homo sapiens
acggaauauguauacggaauaua

SEQ ID NO: 3529 - RNA, 23 nt, Homo sapiens
uauauuccguauacauauuccgu

SEQ ID NO: 3530 - RNA, 24 nt, Homo sapiens
agagcucacagcuguccuucucua

SEQ ID NO: 3531 - RNA, 24 nt, Homo sapiens
uagagaaggacagcugugagcucu

SEQ ID NO: 3532 - RNA, 22 nt, Homo sapiens
aucaaauaaggacuagucugca

SEQ ID NO: 3533 - RNA, 22 nt, Homo sapiens
ugcagacuaguccuuauuugau

SEQ ID NO: 3534 - RNA, 23 nt, Homo sapiens
augagacucauguaaaacaucuu

SEQ ID NO: 3535 - RNA, 23 nt, Homo sapiens
aagauguuuuacaugagucucau

SEQ ID NO: 3536 - RNA, 21 nt, Homo sapiens
auggaauguauauacggaaua

SEQ ID NO: 3537 - RNA, 21 nt, Homo sapiens
uauuccguauauacauuccau

SEQ ID NO: 3538 - RNA, 22 nt, Homo sapiens
auuguagaaccuaagauuggcc

SEQ ID NO: 3539 - RNA, 22 nt, Homo sapiens
ggccaaucuuagguucuacaau

SEQ ID NO: 3540 - RNA, 22 nt, Homo sapiens
caucucuaaggaacucccccaa

SEQ ID NO: 3541 - RNA, 22 nt, Homo sapiens
uugggggaguuccuuagagaug

SEQ ID NO: 3542 - RNA, 23 nt, Homo sapiens
uauggggcuucuguagagauuuc

SEQ ID NO: 3543 - RNA, 23 nt, Homo sapiens
gaaaucucuacagaagccccaua

SEQ ID NO: 3544 - RNA, 20 nt, Homo sapiens
ccguguuucccccacgcuuu

SEQ ID NO: 3545 - RNA, 20 nt, Homo sapiens
aaagcgugggggaaacacgg

SEQ ID NO: 3546 - RNA, 15 nt, Homo sapiens
aggagauccuggguu

SEQ ID NO: 3547 - RNA, 15 nt, Homo sapiens
aacccaggaucuccu

SEQ ID NO: 3548 - RNA, 22 nt, Homo sapiens
cucgugggcucuggccacggcc

SEQ ID NO: 3549 - RNA, 22 nt, Homo sapiens
ggccguggccagagcccacgag

SEQ ID NO: 3550 - RNA, 22 nt, Homo sapiens
caguggccagagcccugcagug

SEQ ID NO: 3551 - RNA, 22 nt, Homo sapiens
cacugcagggcucuggccacug

SEQ ID NO: 3552 - RNA, 22 nt, Homo sapiens
cugcagaguuuguacggaccgg

SEQ ID NO: 3553 - RNA, 22 nt, Homo sapiens
ccgguccguacaaacucugcag

SEQ ID NO: 3554 - RNA, 20 nt, Homo sapiens
uccguacaaacucugcugug

SEQ ID NO: 3555 - RNA, 20 nt, Homo sapiens
cacagcagaguuuguacgga

SEQ ID NO: 3556 - RNA, 22 nt, Homo sapiens
cuuccccccaguaaucuucauc

SEQ ID NO: 3557 - RNA, 22 nt, Homo sapiens
gaugaagauuacuggggggaag

SEQ ID NO: 3558 - RNA, 23 nt, Homo sapiens
ugaggauauggcagggaagggga

SEQ ID NO: 3559 - RNA, 23 nt, Homo sapiens
uccccuucccugccauauccuca

SEQ ID NO: 3560 - RNA, 23 nt, Homo sapiens
uuuugcaugacccugggaguagg

SEQ ID NO: 3561 - RNA, 23 nt, Homo sapiens
ccuacucccagggucaugcaaaa

SEQ ID NO: 3562 - RNA, 22 nt, Homo sapiens
gacucacucacaggauugugca

SEQ ID NO: 3563 - RNA, 22 nt, Homo sapiens
ugcacaauccugugagugaguc

SEQ ID NO: 3564 - RNA, 22 nt, Homo sapiens
acacagugcuucauccacuacu

SEQ ID NO: 3565 - RNA, 22 nt, Homo sapiens
aguaguggaugaagcacugugu

SEQ ID NO: 3566 - RNA, 22 nt, Homo sapiens
uaguggaugaugcacucugugc

SEQ ID NO: 3567 - RNA, 22 nt, Homo sapiens
gcacagagugcaucauccacua

SEQ ID NO: 3568 - RNA, 21 nt, Homo sapiens
ugaugauacagguggagguag

SEQ ID NO: 3569 - RNA, 21 nt, Homo sapiens
cuaccuccaccuguaucauca

SEQ ID NO: 3570 - RNA, 22 nt, Homo sapiens
cuacuucuaccuguguuaucau

SEQ ID NO: 3571 - RNA, 22 nt, Homo sapiens
augauaacacagguagaaguag

SEQ ID NO: 3572 - RNA, 22 nt, Homo sapiens
ugcgacauuggaaguaguauca

SEQ ID NO: 3573 - RNA, 22 nt, Homo sapiens
ugauacuacuuccaaugucgca

SEQ ID NO: 3574 - RNA, 21 nt, Homo sapiens
uuagaccuaguacacguccuu

SEQ ID NO: 3575 - RNA, 21 nt, Homo sapiens
aaggacguguacuaggucuaa

SEQ ID NO: 3576 - RNA, 22 nt, Homo sapiens
uuuccuacccuaccugaagacu

SEQ ID NO: 3577 - RNA, 22 nt, Homo sapiens
agucuucagguaggguaggaaa

SEQ ID NO: 3578 - RNA, 22 nt, Homo sapiens
aucuguaagagaaaguaaauga

SEQ ID NO: 3579 - RNA, 22 nt, Homo sapiens
ucauuuacuuucucuuacagau

SEQ ID NO: 3580 - RNA, 24 nt, Homo sapiens
cccggacaggcguucgugcgacgu

SEQ ID NO: 3581 - RNA, 24 nt, Homo sapiens
acgucgcacgaacgccuguccggg

SEQ ID NO: 3582 - RNA, 23 nt, Homo sapiens
accuggacccagcguagacaaag

SEQ ID NO: 3583 - RNA, 23 nt, Homo sapiens
cuuugucuacgcuggguccaggu

SEQ ID NO: 3584 - RNA, 22 nt, Homo sapiens
accaagucugcgucauccucuc

SEQ ID NO: 3585 - RNA, 22 nt, Homo sapiens
gagaggaugacgcagacuuggu

SEQ ID NO: 3586 - RNA, 23 nt, Homo sapiens
aguggaugauggagacucgguac

SEQ ID NO: 3587 - RNA, 23 nt, Homo sapiens
guaccgagucuccaucauccacu

SEQ ID NO: 3588 - RNA, 24 nt, Homo sapiens
guuccacacugacacugcagaagu

SEQ ID NO: 3589 - RNA, 24 nt, Homo sapiens
acuucugcagugucaguguggaac

SEQ ID NO: 3590 - RNA, 24 nt, Homo sapiens
ccugcuggucaggaguggauacug

SEQ ID NO: 3591 - RNA, 24 nt, Homo sapiens
caguauccacuccugaccagcagg

SEQ ID NO: 3592 - RNA, 23 nt, Homo sapiens
gagggucuugggagggaugugac

SEQ ID NO: 3593 - RNA, 23 nt, Homo sapiens
gucacaucccucccaagacccuc

SEQ ID NO: 3594 - RNA, 22 nt, Homo sapiens
auauacagggggagacucuuau

SEQ ID NO: 3595 - RNA, 22 nt, Homo sapiens
auaagagucucccccuguauau

SEQ ID NO: 3596 - RNA, 22 nt, Homo sapiens
auauacagggggagacucucau

SEQ ID NO: 3597 - RNA, 22 nt, Homo sapiens
augagagucucccccuguauau

SEQ ID NO: 3598 - RNA, 21 nt, Homo sapiens
agaggauacccuuuguauguu

SEQ ID NO: 3599 - RNA, 21 nt, Homo sapiens
aacauacaaaggguauccucu

SEQ ID NO: 3600 - RNA, 22 nt, Homo sapiens
ucuacaaaggaaagcgcuuucu

SEQ ID NO: 3601 - RNA, 22 nt, Homo sapiens
agaaagcgcuuuccuuuguaga

SEQ ID NO: 3602 - RNA, 22 nt, Homo sapiens
ucaaaacugaggggcauuuucu

SEQ ID NO: 3603 - RNA, 22 nt, Homo sapiens
agaaaaugccccucaguuuuga

SEQ ID NO: 3604 - RNA, 24 nt, Homo sapiens
uucuccaaaagaaagcacuuucug

SEQ ID NO: 3605 - RNA, 24 nt, Homo sapiens
cagaaagugcuuucuuuuggagaa

SEQ ID NO: 3606 - RNA, 23 nt, Homo sapiens
uucucgaggaaagaagcacuuuc

SEQ ID NO: 3607 - RNA, 23 nt, Homo sapiens
gaaagugcuucuuuccucgagaa

SEQ ID NO: 3608 - RNA, 22 nt, Homo sapiens
ccucuagauggaagcacugucu

SEQ ID NO: 3609 - RNA, 22 nt, Homo sapiens
agacagugcuuccaucuagagg

SEQ ID NO: 3610 - RNA, 22 nt, Homo sapiens
aucgugcaucccuuuagagugu

SEQ ID NO: 3611 - RNA, 22 nt, Homo sapiens
acacucuaaagggaugcacgau

SEQ ID NO: 3612 - RNA, 22 nt, Homo sapiens
aucgugcaucccuuuagagugu

SEQ ID NO: 3613 - RNA, 22 nt, Homo sapiens
acacucuaaagggaugcacgau

SEQ ID NO: 3614 - RNA, 22 nt, Homo sapiens
aucgugcauccuuuuagagugu

SEQ ID NO: 3615 - RNA, 22 nt, Homo sapiens
acacucuaaaaggaugcacgau

SEQ ID NO: 3616 - RNA, 22 nt, Homo sapiens
caaagcgcuccccuuuagaggu

SEQ ID NO: 3617 - RNA, 22 nt, Homo sapiens
accucuaaaggggagcgcuuug

SEQ ID NO: 3618 - RNA, 23 nt, Homo sapiens
caaagcgcuucucuuuagagugu

SEQ ID NO: 3619 - RNA, 23 nt, Homo sapiens
acacucuaaagagaagcgcuuug

SEQ ID NO: 3620 - RNA, 23 nt, Homo sapiens
ucucuggagggaagcacuuucug

SEQ ID NO: 3621 - RNA, 23 nt, Homo sapiens
cagaaagugcuucccuccagaga

SEQ ID NO: 3622 - RNA, 21 nt, Homo sapiens
gaaagcgcuucucuuuagagg

SEQ ID NO: 3623 - RNA, 21 nt, Homo sapiens
ccucuaaagagaagcgcuuuc

SEQ ID NO: 3624 - RNA, 22 nt, Homo sapiens
cucuagagggaagcacuuucuc

SEQ ID NO: 3625 - RNA, 22 nt, Homo sapiens
gagaaagugcuucccucuagag

SEQ ID NO: 3626 - RNA, 22 nt, Homo sapiens
aaagugcauccuuuuagagugu

SEQ ID NO: 3627 - RNA, 22 nt, Homo sapiens
acacucuaaaaggaugcacuuu

SEQ ID NO: 3628 - RNA, 22 nt, Homo sapiens
cucuagagggaagcgcuuucug

SEQ ID NO: 3629 - RNA, 22 nt, Homo sapiens
cagaaagcgcuucccucuagag

SEQ ID NO: 3630 - RNA, 22 nt, Homo sapiens
caaagugccucccuuuagagug

SEQ ID NO: 3631 - RNA, 22 nt, Homo sapiens
cacucuaaagggaggcacuuug

SEQ ID NO: 3632 - RNA, 22 nt, Homo sapiens
aagugccuccuuuuagaguguu

SEQ ID NO: 3633 - RNA, 22 nt, Homo sapiens
aacacucuaaaaggaggcacuu

SEQ ID NO: 3634 - RNA, 22 nt, Homo sapiens
uucuccaaaagggagcacuuuc

SEQ ID NO: 3635 - RNA, 22 nt, Homo sapiens
gaaagugcucccuuuuggagaa

SEQ ID NO: 3636 - RNA, 22 nt, Homo sapiens
aaagugcuucccuuuggacugu

SEQ ID NO: 3637 - RNA, 22 nt, Homo sapiens
acaguccaaagggaagcacuuu

SEQ ID NO: 3638 - RNA, 21 nt, Homo sapiens
cuccagagggaaguacuuucu

SEQ ID NO: 3639 - RNA, 21 nt, Homo sapiens
agaaaguacuucccucuggag

SEQ ID NO: 3640 - RNA, 22 nt, Homo sapiens
acaaagugcuucccuuuagagu

SEQ ID NO: 3641 - RNA, 22 nt, Homo sapiens
acucuaaagggaagcacuuugu

SEQ ID NO: 3642 - RNA, 22 nt, Homo sapiens
cuacaaagggaagcacuuucuc

SEQ ID NO: 3643 - RNA, 22 nt, Homo sapiens
gagaaagugcuucccuuuguag

SEQ ID NO: 3644 - RNA, 22 nt, Homo sapiens
gaaggcgcuucccuuuagagcg

SEQ ID NO: 3645 - RNA, 22 nt, Homo sapiens
cgcucuaaagggaagcgccuuc

SEQ ID NO: 3646 - RNA, 21 nt, Homo sapiens
cuccagagggaugcacuuucu

SEQ ID NO: 3647 - RNA, 21 nt, Homo sapiens
agaaagugcaucccucuggag

SEQ ID NO: 3648 - RNA, 22 nt, Homo sapiens
cucuagagggaagcacuuucug

SEQ ID NO: 3649 - RNA, 22 nt, Homo sapiens
cagaaagugcuucccucuagag

SEQ ID NO: 3650 - RNA, 22 nt, Homo sapiens
gaaagugcuuccuuuuagaggc

SEQ ID NO: 3651 - RNA, 22 nt, Homo sapiens
gccucuaaaaggaagcacuuuc

SEQ ID NO: 3652 - RNA, 23 nt, Homo sapiens
cucuugagggaagcacuuucugu

SEQ ID NO: 3653 - RNA, 23 nt, Homo sapiens
acagaaagugcuucccucaagag

SEQ ID NO: 3654 - RNA, 22 nt, Homo sapiens
acuggacuuagggucagaaggc

SEQ ID NO: 3655 - RNA, 22 nt, Homo sapiens
gccuucugacccuaaguccagu

SEQ ID NO: 3656 - RNA, 22 nt, Homo sapiens
aaacaaacauggugcacuucuu

SEQ ID NO: 3657 - RNA, 22 nt, Homo sapiens
aagaagugcaccauguuuguuu

SEQ ID NO: 3658 - RNA, 22 nt, Homo sapiens
gaaguugcccauguuauuuucg

SEQ ID NO: 3659 - RNA, 22 nt, Homo sapiens
cgaaaauaacaugggcaacuuc

SEQ ID NO: 3660 - RNA, 21 nt, Homo sapiens
aaucauucacggacaacacuu

SEQ ID NO: 3661 - RNA, 21 nt, Homo sapiens
aaguguuguccgugaaugauu

SEQ ID NO: 3662 - RNA, 22 nt, Homo sapiens
gaaguuguucgugguggauucg

SEQ ID NO: 3663 - RNA, 22 nt, Homo sapiens
cgaauccaccacgaacaacuuc

SEQ ID NO: 3664 - RNA, 23 nt, Homo sapiens
ccuccguguuaccuguccucuag

SEQ ID NO: 3665 - RNA, 23 nt, Homo sapiens
cuagaggacagguaacacggagg

SEQ ID NO: 3666 - RNA, 23 nt, Homo sapiens
ugaggauggauagcaaggaagcc

SEQ ID NO: 3667 - RNA, 23 nt, Homo sapiens
ggcuuccuugcuauccauccuca

SEQ ID NO: 3668 - RNA, 22 nt, Homo sapiens
uucagaucccagcggugccucu

SEQ ID NO: 3669 - RNA, 22 nt, Homo sapiens
agaggcaccgcugggaucugaa

SEQ ID NO: 3670 - RNA, 19 nt, Homo sapiens
guccuaggaggcuccucug

SEQ ID NO: 3671 - RNA, 19 nt, Homo sapiens
cagaggagccuccuaggac

SEQ ID NO: 3672 - RNA, 21 nt, Homo sapiens
caauucucaaaggagccuccc

SEQ ID NO: 3673 - RNA, 21 nt, Homo sapiens
gggaggcuccuuugagaauug

SEQ ID NO: 3674 - RNA, 21 nt, Homo sapiens
guuggggugcaggggucugcu

SEQ ID NO: 3675 - RNA, 21 nt, Homo sapiens
agcagaccccugcaccccaac

SEQ ID NO: 3676 - RNA, 22 nt, Homo sapiens
uuuccggcucgcgugggugugu

SEQ ID NO: 3677 - RNA, 22 nt, Homo sapiens
acacacccacgcgagccggaaa

SEQ ID NO: 3678 - RNA, 23 nt, Homo sapiens
ugagugugugugugugagugugu

SEQ ID NO: 3679 - RNA, 23 nt, Homo sapiens
acacacucacacacacacacuca

SEQ ID NO: 3680 - RNA, 22 nt, Homo sapiens
agugggaggccagggcacggca

SEQ ID NO: 3681 - RNA, 22 nt, Homo sapiens
ugccgugcccuggccucccacu

SEQ ID NO: 3682 - RNA, 20 nt, Homo sapiens
ugagcccuguccucccgcag

SEQ ID NO: 3683 - RNA, 20 nt, Homo sapiens
cugcgggaggacagggcuca

SEQ ID NO: 3684 - RNA, 23 nt, Homo sapiens
aagugccgccaucuuuugagugu

SEQ ID NO: 3685 - RNA, 23 nt, Homo sapiens
acacucaaaagauggcggcacuu

SEQ ID NO: 3686 - RNA, 20 nt, Homo sapiens
acucaaacugugggggcacu

SEQ ID NO: 3687 - RNA, 20 nt, Homo sapiens
agugcccccacaguuugagu

SEQ ID NO: 3688 - RNA, 23 nt, Homo sapiens
aagugcccccacaguuugagugc

SEQ ID NO: 3689 - RNA, 23 nt, Homo sapiens
gcacucaaacugugggggcacuu

SEQ ID NO: 3690 - RNA, 22 nt, Homo sapiens
acucaaaagauggcggcacuuu

SEQ ID NO: 3691 - RNA, 22 nt, Homo sapiens
aaagugccgccaucuuuugagu

SEQ ID NO: 3692 - RNA, 22 nt, Homo sapiens
aaaccuguguuguucaagaguc

SEQ ID NO: 3693 - RNA, 22 nt, Homo sapiens
gacucuugaacaacacagguuu

SEQ ID NO: 3694 - RNA, 22 nt, Homo sapiens
acaguagagggaggaaucgcag

SEQ ID NO: 3695 - RNA, 22 nt, Homo sapiens
cugcgauuccucccucuacugu

SEQ ID NO: 3696 - RNA, 22 nt, Homo sapiens
gugaaauguuuaggaccacuag

SEQ ID NO: 3697 - RNA, 22 nt, Homo sapiens
cuagugguccuaaacauuucac

SEQ ID NO: 3698 - RNA, 23 nt, Homo sapiens
uugaacuguuaagaaccacugga

SEQ ID NO: 3699 - RNA, 23 nt, Homo sapiens
uccagugguucuuaacaguucaa

SEQ ID NO: 3700 - RNA, 22 nt, Homo sapiens
uagugguccuaaacauuucaca

SEQ ID NO: 3701 - RNA, 22 nt, Homo sapiens
ugugaaauguuuaggaccacua

SEQ ID NO: 3702 - RNA, 21 nt, Homo sapiens
ugcaggaccaagaugagcccu

SEQ ID NO: 3703 - RNA, 21 nt, Homo sapiens
agggcucaucuugguccugca

SEQ ID NO: 3704 - RNA, 21 nt, Homo sapiens
cucccacaugcaggguuugca

SEQ ID NO: 3705 - RNA, 21 nt, Homo sapiens
ugcaaacccugcaugugggag

SEQ ID NO: 3706 - RNA, 21 nt, Homo sapiens
caucccuugcaugguggaggg

SEQ ID NO: 3707 - RNA, 21 nt, Homo sapiens
cccuccaccaugcaagggaug

SEQ ID NO: 3708 - RNA, 22 nt, Homo sapiens
aaaaugaaaugagcccagccca

SEQ ID NO: 3709 - RNA, 22 nt, Homo sapiens
ugggcugggcucauuucauuuu

SEQ ID NO: 3710 - RNA, 21 nt, Homo sapiens
agccgcggggaucgccgaggg

SEQ ID NO: 3711 - RNA, 21 nt, Homo sapiens
cccucggcgauccccgcggcu

SEQ ID NO: 3712 - RNA, 19 nt, Homo sapiens
agggaccugagugucuaag

SEQ ID NO: 3713 - RNA, 19 nt, Homo sapiens
cuuagacacucaggucccu

SEQ ID NO: 3714 - RNA, 19 nt, Homo sapiens
aggugugucuguagagucc

SEQ ID NO: 3715 - RNA, 19 nt, Homo sapiens
ggacucuacagacacaccu

SEQ ID NO: 3716 - RNA, 24 nt, Homo sapiens
cauagcccggucgcugguacauga

SEQ ID NO: 3717 - RNA, 24 nt, Homo sapiens
ucauguaccagcgaccgggcuaug

SEQ ID NO: 3718 - RNA, 18 nt, Homo sapiens
cggcuggaggugugagga

SEQ ID NO: 3719 - RNA, 18 nt, Homo sapiens
uccucacaccuccagccg

SEQ ID NO: 3720 - RNA, 18 nt, Homo sapiens
cuaagaaguugacugaag

SEQ ID NO: 3721 - RNA, 18 nt, Homo sapiens
cuucagucaacuucuuag

SEQ ID NO: 3722 - RNA, 19 nt, Homo sapiens
gacuggacaagcugaggaa

SEQ ID NO: 3723 - RNA, 19 nt, Homo sapiens
uuccucagcuuguccaguc

SEQ ID NO: 3724 - RNA, 21 nt, Homo sapiens
gcuugucgcugcgguguugcu

SEQ ID NO: 3725 - RNA, 21 nt, Homo sapiens
agcaacaccgcagcgacaagc

SEQ ID NO: 3726 - RNA, 17 nt, Homo sapiens
ggcgggugcgggggugg

SEQ ID NO: 3727 - RNA, 17 nt, Homo sapiens
ccacccccgcacccgcc

SEQ ID NO: 3728 - RNA, 21 nt, Homo sapiens
ugugucccauuauuggugauu

SEQ ID NO: 3729 - RNA, 21 nt, Homo sapiens
aaucaccaauaaugggacaca

SEQ ID NO: 3730 - RNA, 22 nt, Homo sapiens
uuuaagaaaacaccauggagau

SEQ ID NO: 3731 - RNA, 22 nt, Homo sapiens
aucuccaugguguuuucuuaaa

SEQ ID NO: 3732 - RNA, 22 nt, Homo sapiens
gcuauuucacgacaccaggguu

SEQ ID NO: 3733 - RNA, 22 nt, Homo sapiens
aacccuggugucgugaaauagc

SEQ ID NO: 3734 - RNA, 23 nt, Homo sapiens
agcugguguugugaaucaggccg

SEQ ID NO: 3735 - RNA, 23 nt, Homo sapiens
cggccugauucacaacaccagcu

SEQ ID NO: 3736 - RNA, 21 nt, Homo sapiens
aauaauacaugguugaucuuu

SEQ ID NO: 3737 - RNA, 21 nt, Homo sapiens
aaagaucaaccauguauuauu

SEQ ID NO: 3738 - RNA, 22 nt, Homo sapiens
agaucgaccguguuauauucgc

SEQ ID NO: 3739 - RNA, 22 nt, Homo sapiens
gcgaauauaacacggucgaucu

SEQ ID NO: 3740 - RNA, 22 nt, Homo sapiens
aaucaugugcagugccaauaug

SEQ ID NO: 3741 - RNA, 22 nt, Homo sapiens
cauauuggcacugcacaugauu

SEQ ID NO: 3742 - RNA, 23 nt, Homo sapiens
uuuggcacuagcacauuuuugcu

SEQ ID NO: 3743 - RNA, 23 nt, Homo sapiens
agcaaaaaugugcuagugccaaa

SEQ ID NO: 3744 - RNA, 22 nt, Homo sapiens
uccuguacugagcugccccgag

SEQ ID NO: 3745 - RNA, 22 nt, Homo sapiens
cucggggcagcucaguacagga

SEQ ID NO: 3746 - RNA, 22 nt, Homo sapiens
gcuacuucacaacaccagggcc

SEQ ID NO: 3747 - RNA, 22 nt, Homo sapiens
ggcccugguguugugaaguagc

SEQ ID NO: 3748 - RNA, 22 nt, Homo sapiens
caucaucgucucaaaugagucu

SEQ ID NO: 3749 - RNA, 22 nt, Homo sapiens
agacucauuugagacgaugaug

SEQ ID NO: 3750 - RNA, 23 nt, Homo sapiens
acuccauuuguuuugaugaugga

SEQ ID NO: 3751 - RNA, 23 nt, Homo sapiens
uccaucaucaaaacaaauggagu

SEQ ID NO: 3752 - RNA, 22 nt, Homo sapiens
cuccuacauauuagcauuaaca

SEQ ID NO: 3753 - RNA, 22 nt, Homo sapiens
uguuaaugcuaauauguaggag

SEQ ID NO: 3754 - RNA, 23 nt, Homo sapiens
uuaaugcuaaucgugauaggggu

SEQ ID NO: 3755 - RNA, 23 nt, Homo sapiens
accccuaucacgauuagcauuaa

SEQ ID NO: 3756 - RNA, 22 nt, Homo sapiens
agaucagaaggugauuguggcu

SEQ ID NO: 3757 - RNA, 22 nt, Homo sapiens
agccacaaucaccuucugaucu

SEQ ID NO: 3758 - RNA, 22 nt, Homo sapiens
uacugcagacguggcaaucaug

SEQ ID NO: 3759 - RNA, 22 nt, Homo sapiens
caugauugccacgucugcagua

SEQ ID NO: 3760 - RNA, 21 nt, Homo sapiens
guuagggccaacaucucuugg

SEQ ID NO: 3761 - RNA, 21 nt, Homo sapiens
ccaagagauguuggcccuaac

SEQ ID NO: 3762 - RNA, 21 nt, Homo sapiens
aacauagaggaaauuccacgu

SEQ ID NO: 3763 - RNA, 21 nt, Homo sapiens
acguggaauuuccucuauguu

SEQ ID NO: 3764 - RNA, 21 nt, Homo sapiens
gguggauauuccuucuauguu

SEQ ID NO: 3765 - RNA, 21 nt, Homo sapiens
aacauagaaggaauauccacc

SEQ ID NO: 3766 - RNA, 23 nt, Homo sapiens
ucauagcccuguacaaugcugcu

SEQ ID NO: 3767 - RNA, 23 nt, Homo sapiens
agcagcauuguacagggcuauga

SEQ ID NO: 3768 - RNA, 22 nt, Homo sapiens
uaacacugucugguaaagaugg

SEQ ID NO: 3769 - RNA, 22 nt, Homo sapiens
ccaucuuuaccagacaguguua

SEQ ID NO: 3770 - RNA, 22 nt, Homo sapiens
caucuuccaguacaguguugga

SEQ ID NO: 3771 - RNA, 22 nt, Homo sapiens
uccaacacuguacuggaagaug

SEQ ID NO: 3772 - RNA, 22 nt, Homo sapiens
aacuggccuacaaagucccagu

SEQ ID NO: 3773 - RNA, 22 nt, Homo sapiens
acugggacuuuguaggccaguu

SEQ ID NO: 3774 - RNA, 22 nt, Homo sapiens
ugggucuuugcgggcgagauga

SEQ ID NO: 3775 - RNA, 22 nt, Homo sapiens
ucaucucgcccgcaaagaccca

SEQ ID NO: 3776 - RNA, 21 nt, Homo sapiens
augaccuaugaauugacagac

SEQ ID NO: 3777 - RNA, 21 nt, Homo sapiens
gucugucaauucauaggucau

SEQ ID NO: 3778 - RNA, 22 nt, Homo sapiens
aagcugccaguugaagaacugu

SEQ ID NO: 3779 - RNA, 22 nt, Homo sapiens
acaguucuucaacuggcagcuu

SEQ ID NO: 3780 - RNA, 22 nt, Homo sapiens
aguucuucaguggcaagcuuua

SEQ ID NO: 3781 - RNA, 22 nt, Homo sapiens
uaaagcuugccacugaagaacu

SEQ ID NO: 3782 - RNA, 22 nt, Homo sapiens
acagauucgauucuaggggaau

SEQ ID NO: 3783 - RNA, 22 nt, Homo sapiens
auuccccuagaaucgaaucugu

SEQ ID NO: 3784 - RNA, 23 nt, Homo sapiens
uacccuguagaaccgaauuugug

SEQ ID NO: 3785 - RNA, 23 nt, Homo sapiens
cacaaauucgguucuacagggua

SEQ ID NO: 3786 - RNA, 22 nt, Homo sapiens
uagcagcacguaaauauuggcg

SEQ ID NO: 3787 - RNA, 22 nt, Homo sapiens
cgccaauauuuacgugcugcua

SEQ ID NO: 3788 - RNA, 21 nt, Homo sapiens
ugagaugaagcacuguagcuc

SEQ ID NO: 3789 - RNA, 21 nt, Homo sapiens
gagcuacagugcuucaucuca

SEQ ID NO: 3790 - RNA, 22 nt, Homo sapiens
ggugcagugcugcaucucuggu

SEQ ID NO: 3791 - RNA, 22 nt, Homo sapiens
accagagaugcagcacugcacc

SEQ ID NO: 3792 - RNA, 21 nt, Homo sapiens
uugcucacuguucuucccuag

SEQ ID NO: 3793 - RNA, 21 nt, Homo sapiens
cuagggaagaacagugagcaa

SEQ ID NO: 3794 - RNA, 18 nt, Homo sapiens
cagggucagcugagcaug

SEQ ID NO: 3795 - RNA, 18 nt, Homo sapiens
caugcucagcugacccug

SEQ ID NO: 3796 - RNA, 21 nt, Homo sapiens
aagcauucuuucauugguugg

SEQ ID NO: 3797 - RNA, 21 nt, Homo sapiens
ccaaccaaugaaagaaugcuu

SEQ ID NO: 3798 - RNA, 21 nt, Homo sapiens
ccgucgccgccacccgagccg

SEQ ID NO: 3799 - RNA, 21 nt, Homo sapiens
cggcucggguggcggcgacgg

SEQ ID NO: 3800 - RNA, 27 nt, Homo sapiens
cacuguaggugauggugagagugggca

SEQ ID NO: 3801 - RNA, 27 nt, Homo sapiens
ugcccacucucaccaucaccuacagug

SEQ ID NO: 3802 - RNA, 23 nt, Homo sapiens
gggaugguagaccggugacgugc

SEQ ID NO: 3803 - RNA, 23 nt, Homo sapiens
gcacgucaccggucuaccauccc

SEQ ID NO: 3804 - RNA, 21 nt, Homo sapiens
uaggacacauggucuacuucu

SEQ ID NO: 3805 - RNA, 21 nt, Homo sapiens
agaaguagaccauguguccua

SEQ ID NO: 3806 - RNA, 22 nt, Homo sapiens
cuccugagccauucugagccuc

SEQ ID NO: 3807 - RNA, 22 nt, Homo sapiens
gaggcucagaauggcucaggag

SEQ ID NO: 3808 - RNA, 21 nt, Homo sapiens
gugccagcugcagugggggag

SEQ ID NO: 3809 - RNA, 21 nt, Homo sapiens
cucccccacugcagcuggcac

SEQ ID NO: 3810 - RNA, 21 nt, Homo sapiens
cccggagccaggaugcagcuc

SEQ ID NO: 3811 - RNA, 21 nt, Homo sapiens
gagcugcauccuggcuccggg

SEQ ID NO: 3812 - RNA, 21 nt, Homo sapiens
ucguggccuggucuccauuau

SEQ ID NO: 3813 - RNA, 21 nt, Homo sapiens
auaauggagaccaggccacga

SEQ ID NO: 3814 - RNA, 20 nt, Homo sapiens
ucugcaggguuugcuuugag

SEQ ID NO: 3815 - RNA, 20 nt, Homo sapiens
cucaaagcaaacccugcaga

SEQ ID NO: 3816 - RNA, 21 nt, Homo sapiens
uguucauguagauguuuaagc

SEQ ID NO: 3817 - RNA, 21 nt, Homo sapiens
gcuuaaacaucuacaugaaca

SEQ ID NO: 3818 - RNA, 18 nt, Homo sapiens
ucagcuggcccucauuuc

SEQ ID NO: 3819 - RNA, 18 nt, Homo sapiens
gaaaugagggccagcuga

SEQ ID NO: 3820 - RNA, 21 nt, Homo sapiens
uggcagggaggcugggagggg

SEQ ID NO: 3821 - RNA, 21 nt, Homo sapiens
ccccucccagccucccugcca

SEQ ID NO: 3822 - RNA, 20 nt, Homo sapiens
ucacuguucagacaggcgga

SEQ ID NO: 3823 - RNA, 20 nt, Homo sapiens
uccgccugucugaacaguga

SEQ ID NO: 3824 - RNA, 21 nt, Homo sapiens
ccccaccuccucucuccucag

SEQ ID NO: 3825 - RNA, 21 nt, Homo sapiens
cugaggagagaggaggugggg

SEQ ID NO: 3826 - RNA, 19 nt, Homo sapiens
gugaggacucgggaggugg

SEQ ID NO: 3827 - RNA, 19 nt, Homo sapiens
ccaccucccgaguccucac

SEQ ID NO: 3828 - RNA, 22 nt, Homo sapiens
ugagccccugugccgcccccag

SEQ ID NO: 3829 - RNA, 22 nt, Homo sapiens
cugggggcggcacaggggcuca

SEQ ID NO: 3830 - RNA, 22 nt, Homo sapiens
guggguacggcccagugggggg

SEQ ID NO: 3831 - RNA, 22 nt, Homo sapiens
ccccccacugggccguacccac

SEQ ID NO: 3832 - RNA, 22 nt, Homo sapiens
ucaccagcccuguguucccuag

SEQ ID NO: 3833 - RNA, 22 nt, Homo sapiens
cuagggaacacagggcugguga

SEQ ID NO: 3834 - RNA, 26 nt, Homo sapiens
gugagggcaugcaggccuggaugggg

SEQ ID NO: 3835 - RNA, 26 nt, Homo sapiens
ccccauccaggccugcaugcccucac

SEQ ID NO: 3836 - RNA, 23 nt, Homo sapiens
cucucaccacugcccucccacag

SEQ ID NO: 3837 - RNA, 23 nt, Homo sapiens
cugugggagggcaguggugagag

SEQ ID NO: 3838 - RNA, 24 nt, Homo sapiens
guggguaggguuugggggagagcg

SEQ ID NO: 3839 - RNA, 24 nt, Homo sapiens
cgcucucccccaaacccuacccac

SEQ ID NO: 3840 - RNA, 20 nt, Homo sapiens
gugucugggcggacagcugc

SEQ ID NO: 3841 - RNA, 20 nt, Homo sapiens
gcagcuguccgcccagacac

SEQ ID NO: 3842 - RNA, 20 nt, Homo sapiens
cuuccucgucugucugcccc

SEQ ID NO: 3843 - RNA, 20 nt, Homo sapiens
ggggcagacagacgaggaag

SEQ ID NO: 3844 - RNA, 23 nt, Homo sapiens
gugagugggagccccagugugug

SEQ ID NO: 3845 - RNA, 23 nt, Homo sapiens
cacacacuggggcucccacucac

SEQ ID NO: 3846 - RNA, 27 nt, Homo sapiens
accuucuuguauaagcacugugcuaaa

SEQ ID NO: 3847 - RNA, 27 nt, Homo sapiens
uuuagcacagugcuuauacaagaaggu

SEQ ID NO: 3848 - RNA, 22 nt, Homo sapiens
ggcgacaaaacgagacccuguc

SEQ ID NO: 3849 - RNA, 22 nt, Homo sapiens
gacagggucucguuuugucgcc

SEQ ID NO: 3850 - RNA, 22 nt, Homo sapiens
uugcuugaacccaggaagugga

SEQ ID NO: 3851 - RNA, 22 nt, Homo sapiens
uccacuuccuggguucaagcaa

SEQ ID NO: 3852 - RNA, 19 nt, Homo sapiens
ggagauggagguugcagug

SEQ ID NO: 3853 - RNA, 19 nt, Homo sapiens
cacugcaaccuccaucucc

SEQ ID NO: 3854 - RNA, 21 nt, Homo sapiens
accacugcacuccagccugag

SEQ ID NO: 3855 - RNA, 21 nt, Homo sapiens
cucaggcuggagugcaguggu

SEQ ID NO: 3856 - RNA, 22 nt, Homo sapiens
ggugguugaggcugcaguaagu

SEQ ID NO: 3857 - RNA, 22 nt, Homo sapiens
acuuacugcagccucaaccacc

SEQ ID NO: 3858 - RNA, 17 nt, Homo sapiens
ucgccuccuccucuccc

SEQ ID NO: 3859 - RNA, 17 nt, Homo sapiens
gggagaggaggaggcga

SEQ ID NO: 3860 - RNA, 22 nt, Homo sapiens
ucuauacagacccuggcuuuuc

SEQ ID NO: 3861 - RNA, 22 nt, Homo sapiens
gaaaagccagggucuguauaga

SEQ ID NO: 3862 - RNA, 22 nt, Homo sapiens
ucugggcaacaaagugagaccu

SEQ ID NO: 3863 - RNA, 22 nt, Homo sapiens
aggucucacuuuguugcccaga

SEQ ID NO: 3864 - RNA, 21 nt, Homo sapiens
gaucucacuuuguugcccagg

SEQ ID NO: 3865 - RNA, 21 nt, Homo sapiens
ccugggcaacaaagugagauc

SEQ ID NO: 3866 - RNA, 20 nt, Homo sapiens
ucgcgccccggcucccguuc

SEQ ID NO: 3867 - RNA, 20 nt, Homo sapiens
gaacgggagccggggcgcga

SEQ ID NO: 3868 - RNA, 25 nt, Homo sapiens
ugggaacggguuccggcagacgcug

SEQ ID NO: 3869 - RNA, 25 nt, Homo sapiens
cagcgucugccggaacccguuccca

SEQ ID NO: 3870 - RNA, 21 nt, Homo sapiens
uuaggccgcagaucuggguga

SEQ ID NO: 3871 - RNA, 21 nt, Homo sapiens
ucacccagaucugcggccuaa

SEQ ID NO: 3872 - RNA, 22 nt, Homo sapiens
aauaggccacggaucugggcaa

SEQ ID NO: 3873 - RNA, 22 nt, Homo sapiens
uugcccagauccguggccuauu

SEQ ID NO: 3874 - RNA, 21 nt, Homo sapiens
cacccagaucugcggccuaau

SEQ ID NO: 3875 - RNA, 21 nt, Homo sapiens
auuaggccgcagaucugggug

SEQ ID NO: 3876 - RNA, 22 nt, Homo sapiens
uuagggcccuggcuccaucucc

SEQ ID NO: 3877 - RNA, 22 nt, Homo sapiens
ggagauggagccagggcccuaa

SEQ ID NO: 3878 - RNA, 22 nt, Homo sapiens
uucauucggcuguccagaugua

SEQ ID NO: 3879 - RNA, 22 nt, Homo sapiens
uacaucuggacagccgaaugaa

SEQ ID NO: 3880 - RNA, 24 nt, Homo sapiens
uugcagcugccugggagugacuuc

SEQ ID NO: 3881 - RNA, 24 nt, Homo sapiens
gaagucacucccaggcagcugcaa

SEQ ID NO: 3882 - RNA, 21 nt, Homo sapiens
uugggacauacuuaugcuaaa

SEQ ID NO: 3883 - RNA, 21 nt, Homo sapiens
uuuagcauaaguaugucccaa

SEQ ID NO: 3884 - RNA, 22 nt, Homo sapiens
ucucacuguagccucgaacccc

SEQ ID NO: 3885 - RNA, 22 nt, Homo sapiens
gggguucgaggcuacagugaga

SEQ ID NO: 3886 - RNA, 22 nt, Homo sapiens
uuugaggcuacagugagaugug

SEQ ID NO: 3887 - RNA, 22 nt, Homo sapiens
cacaucucacuguagccucaaa

SEQ ID NO: 3888 - RNA, 18 nt, Homo sapiens
cagggaggugaaugugau

SEQ ID NO: 3889 - RNA, 18 nt, Homo sapiens
aucacauucaccucccug

SEQ ID NO: 3890 - RNA, 19 nt, Homo sapiens
gaugaugcugcugaugcug

SEQ ID NO: 3891 - RNA, 19 nt, Homo sapiens
cagcaucagcagcaucauc

SEQ ID NO: 3892 - RNA, 24 nt, Homo sapiens
ccagacagaauucuaugcacuuuc

SEQ ID NO: 3893 - RNA, 24 nt, Homo sapiens
gaaagugcauagaauucugucugg

SEQ ID NO: 3894 - RNA, 22 nt, Homo sapiens
cuccuggggcccgcacucucgc

SEQ ID NO: 3895 - RNA, 22 nt, Homo sapiens
gcgagagugcgggccccaggag

SEQ ID NO: 3896 - RNA, 21 nt, Homo sapiens
cuccguuugccuguuucgcug

SEQ ID NO: 3897 - RNA, 21 nt, Homo sapiens
cagcgaaacaggcaaacggag

SEQ ID NO: 3898 - RNA, 22 nt, Homo sapiens
cucggcgcggggcgcgggcucc

SEQ ID NO: 3899 - RNA, 22 nt, Homo sapiens
ggagcccgcgccccgcgccgag

SEQ ID NO: 3900 - RNA, 21 nt, Homo sapiens
gcccuccgcccgugcaccccg

SEQ ID NO: 3901 - RNA, 21 nt, Homo sapiens
cggggugcacgggcggagggc

SEQ ID NO: 3902 - RNA, 22 nt, Homo sapiens
gcccgcguguggagccaggugu

SEQ ID NO: 3903 - RNA, 22 nt, Homo sapiens
acaccuggcuccacacgcgggc

SEQ ID NO: 3904 - RNA, 22 nt, Homo sapiens
aaaaccgucuaguuacaguugu

SEQ ID NO: 3905 - RNA, 22 nt, Homo sapiens
acaacuguaacuagacgguuuu

SEQ ID NO: 3906 - RNA, 18 nt, Homo sapiens
uccagugcccuccucucc

SEQ ID NO: 3907 - RNA, 18 nt, Homo sapiens
ggagaggagggcacugga

SEQ ID NO: 3908 - RNA, 18 nt, Homo sapiens
ugaggcaguagauugaau

SEQ ID NO: 3909 - RNA, 18 nt, Homo sapiens
auucaaucuacugccuca

SEQ ID NO: 3910 - RNA, 22 nt, Homo sapiens
aggggcuggcuuuccucugguc

SEQ ID NO: 3911 - RNA, 22 nt, Homo sapiens
gaccagaggaaagccagccccu

SEQ ID NO: 3912 - RNA, 22 nt, Homo sapiens
uggagagaaaggcaguuccuga

SEQ ID NO: 3913 - RNA, 22 nt, Homo sapiens
ucaggaacugccuuucucucca

SEQ ID NO: 3914 - RNA, 22 nt, Homo sapiens
ucgugucuuguguugcagccgg

SEQ ID NO: 3915 - RNA, 22 nt, Homo sapiens
ccggcugcaacacaagacacga

SEQ ID NO: 3916 - RNA, 22 nt, Homo sapiens
ggcuacaacacaggacccgggc

SEQ ID NO: 3917 - RNA, 22 nt, Homo sapiens
gcccggguccuguguuguagcc

SEQ ID NO: 3918 - RNA, 21 nt, Homo sapiens
cggcggggacggcgauugguc

SEQ ID NO: 3919 - RNA, 21 nt, Homo sapiens
gaccaaucgccguccccgccg

SEQ ID NO: 3920 - RNA, 22 nt, Homo sapiens
cgcaggggccgggugcucaccg

SEQ ID NO: 3921 - RNA, 22 nt, Homo sapiens
cggugagcacccggccccugcg

SEQ ID NO: 3922 - RNA, 21 nt, Homo sapiens
ugagugccggugccugcccug

SEQ ID NO: 3923 - RNA, 21 nt, Homo sapiens
cagggcaggcaccggcacuca

SEQ ID NO: 3924 - RNA, 22 nt, Homo sapiens
gcugcgcuuggauuucgucccc

SEQ ID NO: 3925 - RNA, 22 nt, Homo sapiens
ggggacgaaauccaagcgcagc

SEQ ID NO: 3926 - RNA, 23 nt, Homo sapiens
caacggaaucccaaaagcagcug

SEQ ID NO: 3927 - RNA, 23 nt, Homo sapiens
cagcugcuuuugggauuccguug

SEQ ID NO: 3928 - RNA, 22 nt, Homo sapiens
ucaggccaggcacaguggcuca

SEQ ID NO: 3929 - RNA, 22 nt, Homo sapiens
ugagccacugugccuggccuga

SEQ ID NO: 3930 - RNA, 19 nt, Homo sapiens
accgugcaaagguagcaua

SEQ ID NO: 3931 - RNA, 19 nt, Homo sapiens
uaugcuaccuuugcacggu

SEQ ID NO: 3932 - RNA, 20 nt, Homo sapiens
ccuccugcccuccuugcugu

SEQ ID NO: 3933 - RNA, 20 nt, Homo sapiens
acagcaaggagggcaggagg

SEQ ID NO: 3934 - RNA, 20 nt, Homo sapiens
uguuuugauaacaguaaugu

SEQ ID NO: 3935 - RNA, 20 nt, Homo sapiens
acauuacuguuaucaaaaca

SEQ ID NO: 3936 - RNA, 23 nt, Homo sapiens
guguuaauuaaaccucuauuuac

SEQ ID NO: 3937 - RNA, 23 nt, Homo sapiens
guaaauagagguuuaauuaacac

SEQ ID NO: 3938 - RNA, 23 nt, Homo sapiens
cuguaauauaaauuuaauuuauu

SEQ ID NO: 3939 - RNA, 23 nt, Homo sapiens
aauaaauuaaauuuauauuacag

SEQ ID NO: 3940 - RNA, 22 nt, Homo sapiens
uuggggaaacggccgcugagug

SEQ ID NO: 3941 - RNA, 22 nt, Homo sapiens
cacucagcggccguuuccccaa

SEQ ID NO: 3942 - RNA, 21 nt, Homo sapiens
ccucccaugccaagaacuccc

SEQ ID NO: 3943 - RNA, 21 nt, Homo sapiens
gggaguucuuggcaugggagg

SEQ ID NO: 3944 - RNA, 21 nt, Homo sapiens
gguucuuagcauaggaggucu

SEQ ID NO: 3945 - RNA, 21 nt, Homo sapiens
agaccuccuaugcuaagaacc

SEQ ID NO: 3946 - RNA, 21 nt, Homo sapiens
uguucucuuugccaaggacag

SEQ ID NO: 3947 - RNA, 21 nt, Homo sapiens
cuguccuuggcaaagagaaca

SEQ ID NO: 3948 - RNA, 22 nt, Homo sapiens
aaaucucugcaggcaaauguga

SEQ ID NO: 3949 - RNA, 22 nt, Homo sapiens
ucacauuugccugcagagauuu

SEQ ID NO: 3950 - RNA, 22 nt, Homo sapiens
caugguucugucaagcaccgcg

SEQ ID NO: 3951 - RNA, 22 nt, Homo sapiens
cgcggugcuugacagaaccaug

SEQ ID NO: 3952 - RNA, 21 nt, Homo sapiens
uugugcuugaucuaaccaugu

SEQ ID NO: 3953 - RNA, 21 nt, Homo sapiens
acaugguuagaucaagcacaa

SEQ ID NO: 3954 - RNA, 22 nt, Homo sapiens
ucugcaagugucagaggcgagg

SEQ ID NO: 3955 - RNA, 22 nt, Homo sapiens
ccucgccucugacacuugcaga

SEQ ID NO: 3956 - RNA, 22 nt, Homo sapiens
gagagcaguguguguugccugg

SEQ ID NO: 3957 - RNA, 22 nt, Homo sapiens
ccaggcaacacacacugcucuc

SEQ ID NO: 3958 - RNA, 22 nt, Homo sapiens
aucacauugccagugauuaccc

SEQ ID NO: 3959 - RNA, 22 nt, Homo sapiens
ggguaaucacuggcaaugugau

SEQ ID NO: 3960 - RNA, 22 nt, Homo sapiens
agcagaggcagagaggcucagg

SEQ ID NO: 3961 - RNA, 22 nt, Homo sapiens
ccugagccucucugccucugcu

SEQ ID NO: 3962 - RNA, 23 nt, Homo sapiens
ugaggcucuguuagccuuggcuc

SEQ ID NO: 3963 - RNA, 23 nt, Homo sapiens
gagccaaggcuaacagagccuca

SEQ ID NO: 3964 - RNA, 22 nt, Homo sapiens
uaucauggaguugguaaagcac

SEQ ID NO: 3965 - RNA, 22 nt, Homo sapiens
gugcuuuaccaacuccaugaua

SEQ ID NO: 3966 - RNA, 22 nt, Homo sapiens
guuuuaccaccuccaggagacu

SEQ ID NO: 3967 - RNA, 22 nt, Homo sapiens
agucuccuggaggugguaaaac

SEQ ID NO: 3968 - RNA, 22 nt, Homo sapiens
cgccucuucagcgcugucuucc

SEQ ID NO: 3969 - RNA, 22 nt, Homo sapiens
ggaagacagcgcugaagaggcg

SEQ ID NO: 3970 - RNA, 23 nt, Homo sapiens
caggcagugacuguucagacguc

SEQ ID NO: 3971 - RNA, 23 nt, Homo sapiens
gacgucugaacagucacugccug

SEQ ID NO: 3972 - RNA, 23 nt, Homo sapiens
agaauugcguuuggacaaucagu

SEQ ID NO: 3973 - RNA, 23 nt, Homo sapiens
acugauuguccaaacgcaauucu

SEQ ID NO: 3974 - RNA, 22 nt, Homo sapiens
agauguccagccacaauucucg

SEQ ID NO: 3975 - RNA, 22 nt, Homo sapiens
cgagaauuguggcuggacaucu

SEQ ID NO: 3976 - RNA, 24 nt, Homo sapiens
agcagaagcagggagguucuccca

SEQ ID NO: 3977 - RNA, 24 nt, Homo sapiens
ugggagaaccucccugcuucugcu

SEQ ID NO: 3978 - RNA, 22 nt, Homo sapiens
uaugugggaugguaaaccgcuu

SEQ ID NO: 3979 - RNA, 22 nt, Homo sapiens
aagcgguuuaccaucccacaua

SEQ ID NO: 3980 - RNA, 22 nt, Homo sapiens
ugguuuaccgucccacauacau

SEQ ID NO: 3981 - RNA, 22 nt, Homo sapiens
auguaugugggacgguaaacca

SEQ ID NO: 3982 - RNA, 23 nt, Homo sapiens
cagugcaaugauauugucaaagc

SEQ ID NO: 3983 - RNA, 23 nt, Homo sapiens
gcuuugacaauaucauugcacug

SEQ ID NO: 3984 - RNA, 17 nt, Homo sapiens
uaauugcuuccauguuu

SEQ ID NO: 3985 - RNA, 17 nt, Homo sapiens
aaacauggaagcaauua

SEQ ID NO: 3986 - RNA, 23 nt, Homo sapiens
uugccacacugcaacaccuuaca

SEQ ID NO: 3987 - RNA, 23 nt, Homo sapiens
uguaagguguugcaguguggcaa

SEQ ID NO: 3988 - RNA, 21 nt, Homo sapiens
ucuggcuguuguggugugcaa

SEQ ID NO: 3989 - RNA, 21 nt, Homo sapiens
uugcacaccacaacagccaga

SEQ ID NO: 3990 - RNA, 22 nt, Homo sapiens
gauaucagcucaguaggcaccg

SEQ ID NO: 3991 - RNA, 22 nt, Homo sapiens
cggugccuacugagcugauauc

SEQ ID NO: 3992 - RNA, 21 nt, Homo sapiens
guuccugcugaacugagccag

SEQ ID NO: 3993 - RNA, 21 nt, Homo sapiens
cuggcucaguucagcaggaac

SEQ ID NO: 3994 - RNA, 20 nt, Homo sapiens
auauggguuuacuaguuggu

SEQ ID NO: 3995 - RNA, 20 nt, Homo sapiens
accaacuaguaaacccauau

SEQ ID NO: 3996 - RNA, 22 nt, Homo sapiens
ugcuaugccaacauauugccau

SEQ ID NO: 3997 - RNA, 22 nt, Homo sapiens
auggcaauauguuggcauagca

SEQ ID NO: 3998 - RNA, 21 nt, Homo sapiens
aggcaagaugcuggcauagcu

SEQ ID NO: 3999 - RNA, 21 nt, Homo sapiens
agcuaugccagcaucuugccu

SEQ ID NO: 4000 - RNA, 18 nt, Homo sapiens
cggggcggcaggggccuc

SEQ ID NO: 4001 - RNA, 18 nt, Homo sapiens
gaggccccugccgccccg

SEQ ID NO: 4002 - RNA, 19 nt, Homo sapiens
aaaagcuggguugagagga

SEQ ID NO: 4003 - RNA, 19 nt, Homo sapiens
uccucucaacccagcuuuu

SEQ ID NO: 4004 - RNA, 22 nt, Homo sapiens
cccaauacacggucgaccucuu

SEQ ID NO: 4005 - RNA, 22 nt, Homo sapiens
aagaggucgaccguguauuggg

SEQ ID NO: 4006 - RNA, 23 nt, Homo sapiens
agguuguccguggugaguucgca

SEQ ID NO: 4007 - RNA, 23 nt, Homo sapiens
ugcgaacucaccacggacaaccu

SEQ ID NO: 4008 - RNA, 23 nt, Homo sapiens
gcaaagcacacggccugcagaga

SEQ ID NO: 4009 - RNA, 23 nt, Homo sapiens
ucucugcaggccgugugcuuugc

SEQ ID NO: 4010 - RNA, 22 nt, Homo sapiens
ucucugggccugugucuuaggc

SEQ ID NO: 4011 - RNA, 22 nt, Homo sapiens
gccuaagacacaggcccagaga

SEQ ID NO: 4012 - RNA, 21 nt, Homo sapiens
gccccugggccuauccuagaa

SEQ ID NO: 4013 - RNA, 21 nt, Homo sapiens
uucuaggauaggcccaggggc

SEQ ID NO: 4014 - RNA, 22 nt, Homo sapiens
uccgucucaguuacuuuauagc

SEQ ID NO: 4015 - RNA, 22 nt, Homo sapiens
gcuauaaaguaacugagacgga

SEQ ID NO: 4016 - RNA, 22 nt, Homo sapiens
aacacaccuauucaaggauuca

SEQ ID NO: 4017 - RNA, 22 nt, Homo sapiens
ugaauccuugaauagguguguu

SEQ ID NO: 4018 - RNA, 24 nt, Homo sapiens
aauccuuggaaccuaggugugagu

SEQ ID NO: 4019 - RNA, 24 nt, Homo sapiens
acucacaccuagguuccaaggauu

SEQ ID NO: 4020 - RNA, 22 nt, Homo sapiens
uaaugccccuaaaaauccuuau

SEQ ID NO: 4021 - RNA, 22 nt, Homo sapiens
auaaggauuuuuaggggcauua

SEQ ID NO: 4022 - RNA, 23 nt, Homo sapiens
agggacuuuugggggcagaugug

SEQ ID NO: 4023 - RNA, 23 nt, Homo sapiens
cacaucugcccccaaaagucccu

SEQ ID NO: 4024 - RNA, 22 nt, Homo sapiens
uaaugccccuaaaaauccuuau

SEQ ID NO: 4025 - RNA, 22 nt, Homo sapiens
auaaggauuuuuaggggcauua

SEQ ID NO: 4026 - RNA, 22 nt, Homo sapiens
agggacuuucaggggcagcugu

SEQ ID NO: 4027 - RNA, 22 nt, Homo sapiens
acagcugccccugaaagucccu

SEQ ID NO: 4028 - RNA, 24 nt, Homo sapiens
gaaaaugaugaguagugacugaug

SEQ ID NO: 4029 - RNA, 24 nt, Homo sapiens
caucagucacuacucaucauuuuc

SEQ ID NO: 4030 - RNA, 23 nt, Homo sapiens
ugagcaccacacaggccgggcgc

SEQ ID NO: 4031 - RNA, 23 nt, Homo sapiens
gcgcccggccuguguggugcuca

SEQ ID NO: 4032 - RNA, 21 nt, Homo sapiens
gcuggucugcguggugcucgg

SEQ ID NO: 4033 - RNA, 21 nt, Homo sapiens
ccgagcaccacgcagaccagc

SEQ ID NO: 4034 - RNA, 22 nt, Homo sapiens
gccugcugggguggaaccuggu

SEQ ID NO: 4035 - RNA, 22 nt, Homo sapiens
accagguuccaccccagcaggc

SEQ ID NO: 4036 - RNA, 23 nt, Homo sapiens
gaagugcuucgauuuuggggugu

SEQ ID NO: 4037 - RNA, 23 nt, Homo sapiens
acaccccaaaaucgaagcacuuc

SEQ ID NO: 4038 - RNA, 22 nt, Homo sapiens
acucaaaaugggggcgcuuucc

SEQ ID NO: 4039 - RNA, 22 nt, Homo sapiens
ggaaagcgcccccauuuugagu

SEQ ID NO: 4040 - RNA, 22 nt, Homo sapiens
uauguaacaugguccacuaacu

SEQ ID NO: 4041 - RNA, 22 nt, Homo sapiens
aguuaguggaccauguuacaua

SEQ ID NO: 4042 - RNA, 21 nt, Homo sapiens
ugguagacuauggaacguagg

SEQ ID NO: 4043 - RNA, 21 nt, Homo sapiens
ccuacguuccauagucuacca

SEQ ID NO: 4044 - RNA, 22 nt, Homo sapiens
uguagauacgagcaccagccac

SEQ ID NO: 4045 - RNA, 22 nt, Homo sapiens
guggcuggugcucguaucuaca

SEQ ID NO: 4046 - RNA, 23 nt, Homo sapiens
acaggcggcuguagcaauggggg

SEQ ID NO: 4047 - RNA, 23 nt, Homo sapiens
cccccauugcuacagccgccugu

SEQ ID NO: 4048 - RNA, 22 nt, Homo sapiens
aauucccuuguagauaacccgg

SEQ ID NO: 4049 - RNA, 22 nt, Homo sapiens
ccggguuaucuacaagggaauu

SEQ ID NO: 4050 - RNA, 22 nt, Homo sapiens
uacgcgcagaccacaggauguc

SEQ ID NO: 4051 - RNA, 22 nt, Homo sapiens
gacauccuguggucugcgcgua

SEQ ID NO: 4052 - RNA, 22 nt, Homo sapiens
uuacacacaacugaggaucaua

SEQ ID NO: 4053 - RNA, 22 nt, Homo sapiens
uaugauccucaguuguguguaa

SEQ ID NO: 4054 - RNA, 23 nt, Homo sapiens
uagcccccaggcuucacuuggcg

SEQ ID NO: 4055 - RNA, 23 nt, Homo sapiens
cgccaagugaagccugggggcua

SEQ ID NO: 4056 - RNA, 23 nt, Homo sapiens
agggcauaggagaggguugauau

SEQ ID NO: 4057 - RNA, 23 nt, Homo sapiens
auaucaacccucuccuaugcccu

SEQ ID NO: 4058 - RNA, 22 nt, Homo sapiens
gaauguugcucggugaaccccu

SEQ ID NO: 4059 - RNA, 22 nt, Homo sapiens
agggguucaccgagcaacauuc

SEQ ID NO: 4060 - RNA, 23 nt, Homo sapiens
agguuacccgagcaacuuugcau

SEQ ID NO: 4061 - RNA, 23 nt, Homo sapiens
augcaaaguugcucggguaaccu

SEQ ID NO: 4062 - RNA, 22 nt, Homo sapiens
uauguaacacgguccacuaacc

SEQ ID NO: 4063 - RNA, 22 nt, Homo sapiens
gguuaguggaccguguuacaua

SEQ ID NO: 4064 - RNA, 21 nt, Homo sapiens
uaguagaccguauagcguacg

SEQ ID NO: 4065 - RNA, 21 nt, Homo sapiens
cguacgcuauacggucuacua

SEQ ID NO: 4066 - RNA, 23 nt, Homo sapiens
acuucaccugguccacuagccgu

SEQ ID NO: 4067 - RNA, 23 nt, Homo sapiens
acggcuaguggaccaggugaagu

SEQ ID NO: 4068 - RNA, 18 nt, Homo sapiens
guguucucugauggacag

SEQ ID NO: 4069 - RNA, 18 nt, Homo sapiens
cuguccaucagagaacac

SEQ ID NO: 4070 - RNA, 22 nt, Homo sapiens
caggucgucuugcagggcuucu

SEQ ID NO: 4071 - RNA, 22 nt, Homo sapiens
agaagcccugcaagacgaccug

SEQ ID NO: 4072 - RNA, 21 nt, Homo sapiens
ugucuugcaggccgucaugca

SEQ ID NO: 4073 - RNA, 21 nt, Homo sapiens
ugcaugacggccugcaagaca

SEQ ID NO: 4074 - RNA, 22 nt, Homo sapiens
aucaugaugggcuccucggugu

SEQ ID NO: 4075 - RNA, 22 nt, Homo sapiens
acaccgaggagcccaucaugau

SEQ ID NO: 4076 - RNA, 23 nt, Homo sapiens
uugcuaguugcacuccucucugu

SEQ ID NO: 4077 - RNA, 23 nt, Homo sapiens
acagagaggagugcaacuagcaa

SEQ ID NO: 4078 - RNA, 25 nt, Homo sapiens
uaggcaguguauugcuagcggcugu

SEQ ID NO: 4079 - RNA, 25 nt, Homo sapiens
acagccgcuagcaauacacugccua

SEQ ID NO: 4080 - RNA, 22 nt, Homo sapiens
auuggggacauuuugcauucau

SEQ ID NO: 4081 - RNA, 22 nt, Homo sapiens
augaaugcaaaauguccccaau

SEQ ID NO: 4082 - RNA, 22 nt, Homo sapiens
uuuugcgauguguuccuaauau

SEQ ID NO: 4083 - RNA, 22 nt, Homo sapiens
auauuaggaacacaucgcaaaa

SEQ ID NO: 4084 - RNA, 22 nt, Homo sapiens
uugggaucauuuugcauccaua

SEQ ID NO: 4085 - RNA, 22 nt, Homo sapiens
uauggaugcaaaaugaucccaa

SEQ ID NO: 4086 - RNA, 22 nt, Homo sapiens
uuuugcaauauguuccugaaua

SEQ ID NO: 4087 - RNA, 22 nt, Homo sapiens
uauucaggaacauauugcaaaa

SEQ ID NO: 4088 - RNA, 21 nt, Homo sapiens
gcaguccaugggcauauacac

SEQ ID NO: 4089 - RNA, 21 nt, Homo sapiens
guguauaugcccauggacugc

SEQ ID NO: 4090 - RNA, 22 nt, Homo sapiens
uaugugccuuuggacuacaucg

SEQ ID NO: 4091 - RNA, 22 nt, Homo sapiens
cgauguaguccaaaggcacaua

SEQ ID NO: 4092 - RNA, 23 nt, Homo sapiens
auacacauacacgcaacacacau

SEQ ID NO: 4093 - RNA, 23 nt, Homo sapiens
auguguguugcguguauguguau

SEQ ID NO: 4094 - RNA, 23 nt, Homo sapiens
uugcaugucagauuguaauuccc

SEQ ID NO: 4095 - RNA, 23 nt, Homo sapiens
gggaauuacaaucugacaugcaa

SEQ ID NO: 4096 - RNA, 21 nt, Homo sapiens
ucacuccucuccucccgucuu

SEQ ID NO: 4097 - RNA, 21 nt, Homo sapiens
aagacgggaggagaggaguga

SEQ ID NO: 4098 - RNA, 22 nt, Homo sapiens
ucaggcucaguccccucccgau

SEQ ID NO: 4099 - RNA, 22 nt, Homo sapiens
aucgggaggggacugagccuga

SEQ ID NO: 4100 - RNA, 22 nt, Homo sapiens
gucauacacggcucuccucucu

SEQ ID NO: 4101 - RNA, 22 nt, Homo sapiens
agagaggagagccguguaugac

SEQ ID NO: 4102 - RNA, 22 nt, Homo sapiens
agaggcuggccgugaugaauuc

SEQ ID NO: 4103 - RNA, 22 nt, Homo sapiens
gaauucaucacggccagccucu

SEQ ID NO: 4104 - RNA, 22 nt, Homo sapiens
aaucauacagggacauccaguu

SEQ ID NO: 4105 - RNA, 22 nt, Homo sapiens
aacuggaugucccuguaugauu

SEQ ID NO: 4106 - RNA, 22 nt, Homo sapiens
aaucguacagggucauccacuu

SEQ ID NO: 4107 - RNA, 22 nt, Homo sapiens
aaguggaugacccuguacgauu

SEQ ID NO: 4108 - RNA, 21 nt, Homo sapiens
uugaaaggcuauuucuugguc

SEQ ID NO: 4109 - RNA, 21 nt, Homo sapiens
gaccaagaaauagccuuucaa

SEQ ID NO: 4110 - RNA, 21 nt, Homo sapiens
cccagauaauggcacucucaa

SEQ ID NO: 4111 - RNA, 21 nt, Homo sapiens
uugagagugccauuaucuggg

SEQ ID NO: 4112 - RNA, 22 nt, Homo sapiens
caaccuggaggacuccaugcug

SEQ ID NO: 4113 - RNA, 22 nt, Homo sapiens
cagcauggaguccuccagguug

SEQ ID NO: 4114 - RNA, 20 nt, Homo sapiens
ccauggaucuccaggugggu

SEQ ID NO: 4115 - RNA, 20 nt, Homo sapiens
acccaccuggagauccaugg

SEQ ID NO: 4116 - RNA, 22 nt, Homo sapiens
cuuaugcaagauucccuucuac

SEQ ID NO: 4117 - RNA, 22 nt, Homo sapiens
guagaagggaaucuugcauaag

SEQ ID NO: 4118 - RNA, 22 nt, Homo sapiens
aguggggaacccuuccaugagg

SEQ ID NO: 4119 - RNA, 22 nt, Homo sapiens
ccucauggaaggguuccccacu

SEQ ID NO: 4120 - RNA, 23 nt, Homo sapiens
aggaccugcgggacaagauucuu

SEQ ID NO: 4121 - RNA, 23 nt, Homo sapiens
aagaaucuugucccgcagguccu

SEQ ID NO: 4122 - RNA, 22 nt, Homo sapiens
caaaccacacugugguguuaga

SEQ ID NO: 4123 - RNA, 22 nt, Homo sapiens
ucuaacaccacagugugguuug

SEQ ID NO: 4124 - RNA, 21 nt, Homo sapiens
cagcagcacacugugguuugu

SEQ ID NO: 4125 - RNA, 21 nt, Homo sapiens
acaaaccacagugugcugcug

SEQ ID NO: 4126 - RNA, 23 nt, Homo sapiens
uuucaagccagggggcguuuuuc

SEQ ID NO: 4127 - RNA, 23 nt, Homo sapiens
gaaaaacgcccccuggcuugaaa

SEQ ID NO: 4128 - RNA, 20 nt, Homo sapiens
ucacuaccugacaauacagu

SEQ ID NO: 4129 - RNA, 20 nt, Homo sapiens
acuguauugucagguaguga

SEQ ID NO: 4130 - RNA, 21 nt, Homo sapiens
ugcuguauugucagguaguga

SEQ ID NO: 4131 - RNA, 21 nt, Homo sapiens
ucacuaccugacaauacagca

SEQ ID NO: 4132 - RNA, 22 nt, Homo sapiens
uucugccucuguccagguccuu

SEQ ID NO: 4133 - RNA, 22 nt, Homo sapiens
aaggaccuggacagaggcagaa

SEQ ID NO: 4134 - RNA, 24 nt, Homo sapiens
agggcuggacucagcggcggagcu

SEQ ID NO: 4135 - RNA, 24 nt, Homo sapiens
agcuccgccgcugaguccagcccu

SEQ ID NO: 4136 - RNA, 21 nt, Homo sapiens
ugacugccucacugaccacuu

SEQ ID NO: 4137 - RNA, 21 nt, Homo sapiens
aaguggucagugaggcaguca

SEQ ID NO: 4138 - RNA, 24 nt, Homo sapiens
aauuugguuucugaggcacuuagu

SEQ ID NO: 4139 - RNA, 24 nt, Homo sapiens
acuaagugccucagaaaccaaauu

SEQ ID NO: 4140 - RNA, 21 nt, Homo sapiens
uacuuuucuagguuguugggg

SEQ ID NO: 4141 - RNA, 21 nt, Homo sapiens
ccccaacaaccuagaaaagua

SEQ ID NO: 4142 - RNA, 23 nt, Homo sapiens
ucacaacaaccuugcaggguaga

SEQ ID NO: 4143 - RNA, 23 nt, Homo sapiens
ucuacccugcaagguuguuguga

SEQ ID NO: 4144 - RNA, 22 nt, Homo sapiens
cuuggauuuuccugggccucag

SEQ ID NO: 4145 - RNA, 22 nt, Homo sapiens
cugaggcccaggaaaauccaag

SEQ ID NO: 4146 - RNA, 22 nt, Homo sapiens
ugaggacagggcaaauucacga

SEQ ID NO: 4147 - RNA, 22 nt, Homo sapiens
ucgugaauuugcccuguccuca

SEQ ID NO: 4148 - RNA, 22 nt, Homo sapiens
aucauaugaaccaaacucuaau

SEQ ID NO: 4149 - RNA, 22 nt, Homo sapiens
auuagaguuugguucauaugau

SEQ ID NO: 4150 - RNA, 22 nt, Homo sapiens
uagagucuggcugauaugguuu

SEQ ID NO: 4151 - RNA, 22 nt, Homo sapiens
aaaccauaucagccagacucua

SEQ ID NO: 4152 - RNA, 21 nt, Homo sapiens
ccugugcucccagggccucgc

SEQ ID NO: 4153 - RNA, 21 nt, Homo sapiens
gcgaggcccugggagcacagg

SEQ ID NO: 4154 - RNA, 22 nt, Homo sapiens
ugaggcccuuggggcacagugg

SEQ ID NO: 4155 - RNA, 22 nt, Homo sapiens
ccacugugccccaagggccuca

SEQ ID NO: 4156 - RNA, 22 nt, Homo sapiens
uccuaaaucugaaaguccaaaa

SEQ ID NO: 4157 - RNA, 22 nt, Homo sapiens
uuuuggacuuucagauuuagga

SEQ ID NO: 4158 - RNA, 24 nt, Homo sapiens
uuggacuuuuucagauuuggggau

SEQ ID NO: 4159 - RNA, 24 nt, Homo sapiens
auccccaaaucugaaaaaguccaa

SEQ ID NO: 4160 - RNA, 22 nt, Homo sapiens
augcaccugggcaaggauucug

SEQ ID NO: 4161 - RNA, 22 nt, Homo sapiens
cagaauccuugcccaggugcau

SEQ ID NO: 4162 - RNA, 23 nt, Homo sapiens
uaauccuugcuaccugggugaga

SEQ ID NO: 4163 - RNA, 23 nt, Homo sapiens
ucucacccagguagcaaggauua

SEQ ID NO: 4164 - RNA, 22 nt, Homo sapiens
uuuugugucucccauuccccag

SEQ ID NO: 4165 - RNA, 22 nt, Homo sapiens
cuggggaaugggagacacaaaa

SEQ ID NO: 4166 - RNA, 22 nt, Homo sapiens
agggggauggcagagcaaaauu

SEQ ID NO: 4167 - RNA, 22 nt, Homo sapiens
aauuuugcucugccaucccccu

SEQ ID NO: 4168 - RNA, 22 nt, Homo sapiens
gugcauggcuguauauauaaca

SEQ ID NO: 4169 - RNA, 22 nt, Homo sapiens
uguuauauauacagccaugcac

SEQ ID NO: 4170 - RNA, 21 nt, Homo sapiens
uauauauacagccaugcacuc

SEQ ID NO: 4171 - RNA, 21 nt, Homo sapiens
gagugcauggcuguauauaua

SEQ ID NO: 4172 - RNA, 22 nt, Homo sapiens
aaugcacccgggcaaggauucu

SEQ ID NO: 4173 - RNA, 22 nt, Homo sapiens
agaauccuugcccgggugcauu

SEQ ID NO: 4174 - RNA, 22 nt, Homo sapiens
aauccuuugucccugggugaga

SEQ ID NO: 4175 - RNA, 22 nt, Homo sapiens
ucucacccagggacaaaggauu

SEQ ID NO: 4176 - RNA, 22 nt, Homo sapiens
aaugcaccugggcaaggauuca

SEQ ID NO: 4177 - RNA, 22 nt, Homo sapiens
ugaauccuugcccaggugcauu

SEQ ID NO: 4178 - RNA, 21 nt, Homo sapiens
auccuugcuaucugggugcua

SEQ ID NO: 4179 - RNA, 21 nt, Homo sapiens
uagcacccagauagcaaggau

SEQ ID NO: 4180 - RNA, 22 nt, Homo sapiens
agacccuggucugcacucuauc

SEQ ID NO: 4181 - RNA, 22 nt, Homo sapiens
gauagagugcagaccagggucu

SEQ ID NO: 4182 - RNA, 21 nt, Homo sapiens
uugcagcugcgguuguaaggu

SEQ ID NO: 4183 - RNA, 21 nt, Homo sapiens
accuuacaaccgcagcugcaa

SEQ ID NO: 4184 - RNA, 22 nt, Homo sapiens
cgucaacacuugcugguuuccu

SEQ ID NO: 4185 - RNA, 22 nt, Homo sapiens
aggaaaccagcaaguguugacg

SEQ ID NO: 4186 - RNA, 22 nt, Homo sapiens
gggagccaggaaguauugaugu

SEQ ID NO: 4187 - RNA, 22 nt, Homo sapiens
acaucaauacuuccuggcuccc

SEQ ID NO: 4188 - RNA, 21 nt, Homo sapiens
uaaggcacccuucugaguaga

SEQ ID NO: 4189 - RNA, 21 nt, Homo sapiens
ucuacucagaagggugccuua

SEQ ID NO: 4190 - RNA, 22 nt, Homo sapiens
uauucaggaagguguuacuuaa

SEQ ID NO: 4191 - RNA, 22 nt, Homo sapiens
uuaaguaacaccuuccugaaua

SEQ ID NO: 4192 - RNA, 21 nt, Homo sapiens
uuuugcaccuuuuggagugaa

SEQ ID NO: 4193 - RNA, 21 nt, Homo sapiens
uucacuccaaaaggugcaaaa

SEQ ID NO: 4194 - RNA, 23 nt, Homo sapiens
ugauuguagccuuuuggaguaga

SEQ ID NO: 4195 - RNA, 23 nt, Homo sapiens
ucuacuccaaaaggcuacaauca

SEQ ID NO: 4196 - RNA, 23 nt, Homo sapiens
ggguuuguagcuuugcuggcaug

SEQ ID NO: 4197 - RNA, 23 nt, Homo sapiens
caugccagcaaagcuacaaaccc

SEQ ID NO: 4198 - RNA, 23 nt, Homo sapiens
cagggcucagggauuggauggag

SEQ ID NO: 4199 - RNA, 23 nt, Homo sapiens
cuccauccaaucccugagcccug

SEQ ID NO: 4200 - RNA, 23 nt, Homo sapiens
augcuacucggaaaucccacuga

SEQ ID NO: 4201 - RNA, 23 nt, Homo sapiens
ucagugggauuuccgaguagcau

SEQ ID NO: 4202 - RNA, 21 nt, Homo sapiens
gugggauuucugaguagcauc

SEQ ID NO: 4203 - RNA, 21 nt, Homo sapiens
gaugcuacucagaaaucccac

SEQ ID NO: 4204 - RNA, 23 nt, Homo sapiens
ccggggcagauugguguagggug

SEQ ID NO: 4205 - RNA, 23 nt, Homo sapiens
cacccuacaccaaucugccccgg

SEQ ID NO: 4206 - RNA, 23 nt, Homo sapiens
acggagacgacaagacugugcug

SEQ ID NO: 4207 - RNA, 23 nt, Homo sapiens
cagcacagucuugucgucuccgu

SEQ ID NO: 4208 - RNA, 22 nt, Homo sapiens
aauccacgcugagcuuggcauc

SEQ ID NO: 4209 - RNA, 22 nt, Homo sapiens
gaugccaagcucagcguggauu

SEQ ID NO: 4210 - RNA, 23 nt, Homo sapiens
aggaaaugaggcuggcuaggagc

SEQ ID NO: 4211 - RNA, 23 nt, Homo sapiens
gcuccuagccagccucauuuccu

SEQ ID NO: 4212 - RNA, 22 nt, Homo sapiens
ugauugguacgucuguggguag

SEQ ID NO: 4213 - RNA, 22 nt, Homo sapiens
cuacccacagacguaccaauca

SEQ ID NO: 4214 - RNA, 22 nt, Homo sapiens
aaucagugaaugccuugaaccu

SEQ ID NO: 4215 - RNA, 22 nt, Homo sapiens
agguucaaggcauucacugauu

SEQ ID NO: 4216 - RNA, 21 nt, Homo sapiens
uuacaggcgugaaccaccgcg

SEQ ID NO: 4217 - RNA, 21 nt, Homo sapiens
cgcggugguucacgccuguaa

SEQ ID NO: 4218 - RNA, 21 nt, Homo sapiens
uacugcagacaguggcaauca

SEQ ID NO: 4219 - RNA, 21 nt, Homo sapiens
ugauugccacugucugcagua

SEQ ID NO: 4220 - RNA, 21 nt, Homo sapiens
guuucaccauguuggucaggc

SEQ ID NO: 4221 - RNA, 21 nt, Homo sapiens
gccugaccaacauggugaaac

SEQ ID NO: 4222 - RNA, 23 nt, Homo sapiens
uaaauuucaccuuucugagaagg

SEQ ID NO: 4223 - RNA, 23 nt, Homo sapiens
ccuucucagaaaggugaaauuua

SEQ ID NO: 4224 - RNA, 22 nt, Homo sapiens
uucacaaggaggugucauuuau

SEQ ID NO: 4225 - RNA, 22 nt, Homo sapiens
auaaaugacaccuccuugugaa

SEQ ID NO: 4226 - RNA, 23 nt, Homo sapiens
uaaauuucaccuuucugagaaga

SEQ ID NO: 4227 - RNA, 23 nt, Homo sapiens
ucuucucagaaaggugaaauuua

SEQ ID NO: 4228 - RNA, 22 nt, Homo sapiens
uucucaaggaggugucguuuau

SEQ ID NO: 4229 - RNA, 22 nt, Homo sapiens
auaaacgacaccuccuugagaa

SEQ ID NO: 4230 - RNA, 21 nt, Homo sapiens
auugacacuucugugaguaga

SEQ ID NO: 4231 - RNA, 21 nt, Homo sapiens
ucuacucacagaagugucaau

SEQ ID NO: 4232 - RNA, 23 nt, Homo sapiens
uacucuggagagugacaaucaug

SEQ ID NO: 4233 - RNA, 23 nt, Homo sapiens
caugauugucacucuccagagua

SEQ ID NO: 4234 - RNA, 21 nt, Homo sapiens
auugacaccucugugagugga

SEQ ID NO: 4235 - RNA, 21 nt, Homo sapiens
uccacucacagaggugucaau

SEQ ID NO: 4236 - RNA, 22 nt, Homo sapiens
uucucaagagggaggcaaucau

SEQ ID NO: 4237 - RNA, 22 nt, Homo sapiens
augauugccucccucuugagaa

SEQ ID NO: 4238 - RNA, 22 nt, Homo sapiens
gagugccuucuuuuggagcguu

SEQ ID NO: 4239 - RNA, 22 nt, Homo sapiens
aacgcuccaaaagaaggcacuc

SEQ ID NO: 4240 - RNA, 18 nt, Homo sapiens
ugcuuccuuucagagggu

SEQ ID NO: 4241 - RNA, 18 nt, Homo sapiens
acccucugaaaggaagca

SEQ ID NO: 4242 - RNA, 22 nt, Homo sapiens
aucuggagguaagaagcacuuu

SEQ ID NO: 4243 - RNA, 22 nt, Homo sapiens
aaagugcuucuuaccuccagau

SEQ ID NO: 4244 - RNA, 22 nt, Homo sapiens
gaaagcgcuucccuuugcugga

SEQ ID NO: 4245 - RNA, 22 nt, Homo sapiens
uccagcaaagggaagcgcuuuc

SEQ ID NO: 4246 - RNA, 20 nt, Homo sapiens
cugcaaagggaagcccuuuc

SEQ ID NO: 4247 - RNA, 20 nt, Homo sapiens
gaaagggcuucccuuugcag

SEQ ID NO: 4248 - RNA, 21 nt, Homo sapiens
caaagcgcuucccuuuggagc

SEQ ID NO: 4249 - RNA, 21 nt, Homo sapiens
gcuccaaagggaagcgcuuug

SEQ ID NO: 4250 - RNA, 22 nt, Homo sapiens
cucuagagggaagcacuuucug

SEQ ID NO: 4251 - RNA, 22 nt, Homo sapiens
cagaaagugcuucccucuagag

SEQ ID NO: 4252 - RNA, 21 nt, Homo sapiens
aaagcgcuucccuucagagug

SEQ ID NO: 4253 - RNA, 21 nt, Homo sapiens
cacucugaagggaagcgcuuu

SEQ ID NO: 4254 - RNA, 22 nt, Homo sapiens
cucuagagggaagcgcuuucug

SEQ ID NO: 4255 - RNA, 22 nt, Homo sapiens
cagaaagcgcuucccucuagag

SEQ ID NO: 4256 - RNA, 22 nt, Homo sapiens
aaagugcauccuuuuagagguu

SEQ ID NO: 4257 - RNA, 22 nt, Homo sapiens
aaccucuaaaaggaugcacuuu

SEQ ID NO: 4258 - RNA, 22 nt, Homo sapiens
cucuagagggaagcgcuuucug

SEQ ID NO: 4259 - RNA, 22 nt, Homo sapiens
cagaaagcgcuucccucuagag

SEQ ID NO: 4260 - RNA, 22 nt, Homo sapiens
aaagugcaucuuuuuagaggau

SEQ ID NO: 4261 - RNA, 22 nt, Homo sapiens
auccucuaaaaagaugcacuuu

SEQ ID NO: 4262 - RNA, 22 nt, Homo sapiens
cucuagagggaagcgcuuucug

SEQ ID NO: 4263 - RNA, 22 nt, Homo sapiens
cagaaagcgcuucccucuagag

SEQ ID NO: 4264 - RNA, 21 nt, Homo sapiens
aaagugcuuccuuuuagaggg

SEQ ID NO: 4265 - RNA, 21 nt, Homo sapiens
cccucuaaaaggaagcacuuu

SEQ ID NO: 4266 - RNA, 22 nt, Homo sapiens
aaagugcuuccuuuuagagggu

SEQ ID NO: 4267 - RNA, 22 nt, Homo sapiens
acccucuaaaaggaagcacuuu

SEQ ID NO: 4268 - RNA, 22 nt, Homo sapiens
cucuagagggaagcacuuucug

SEQ ID NO: 4269 - RNA, 22 nt, Homo sapiens
cagaaagugcuucccucuagag

SEQ ID NO: 4270 - RNA, 22 nt, Homo sapiens
aaagugcuucucuuuggugggu

SEQ ID NO: 4271 - RNA, 22 nt, Homo sapiens
acccaccaaagagaagcacuuu

SEQ ID NO: 4272 - RNA, 20 nt, Homo sapiens
cuacaaagggaagcccuuuc

SEQ ID NO: 4273 - RNA, 20 nt, Homo sapiens
gaaagggcuucccuuuguag

SEQ ID NO: 4274 - RNA, 21 nt, Homo sapiens
aaagugcuuccuuuuugaggg

SEQ ID NO: 4275 - RNA, 21 nt, Homo sapiens
cccucaaaaaggaagcacuuu

SEQ ID NO: 4276 - RNA, 22 nt, Homo sapiens
aagugcuuccuuuuagaggguu

SEQ ID NO: 4277 - RNA, 22 nt, Homo sapiens
aacccucuaaaaggaagcacuu

SEQ ID NO: 4278 - RNA, 24 nt, Homo sapiens
acaaagugcuucccuuuagagugu

SEQ ID NO: 4279 - RNA, 24 nt, Homo sapiens
acacucuaaagggaagcacuuugu

SEQ ID NO: 4280 - RNA, 22 nt, Homo sapiens
aacgcacuucccuuuagagugu

SEQ ID NO: 4281 - RNA, 22 nt, Homo sapiens
acacucuaaagggaagugcguu

SEQ ID NO: 4282 - RNA, 22 nt, Homo sapiens
aaaaugguucccuuuagagugu

SEQ ID NO: 4283 - RNA, 22 nt, Homo sapiens
acacucuaaagggaaccauuuu

SEQ ID NO: 4284 - RNA, 22 nt, Homo sapiens
cucuagagggaagcgcuuucug

SEQ ID NO: 4285 - RNA, 22 nt, Homo sapiens
cagaaagcgcuucccucuagag

SEQ ID NO: 4286 - RNA, 23 nt, Homo sapiens
gaacgcgcuucccuauagagggu

SEQ ID NO: 4287 - RNA, 23 nt, Homo sapiens
acccucuauagggaagcgcguuc

SEQ ID NO: 4288 - RNA, 22 nt, Homo sapiens
cucuagagggaagcgcuuucug

SEQ ID NO: 4289 - RNA, 22 nt, Homo sapiens
cagaaagcgcuucccucuagag

SEQ ID NO: 4290 - RNA, 21 nt, Homo sapiens
gaaggcgcuucccuuuggagu

SEQ ID NO: 4291 - RNA, 21 nt, Homo sapiens
acuccaaagggaagcgccuuc

SEQ ID NO: 4292 - RNA, 20 nt, Homo sapiens
cugcaaagggaagcccuuuc

SEQ ID NO: 4293 - RNA, 20 nt, Homo sapiens
gaaagggcuucccuuugcag

SEQ ID NO: 4294 - RNA, 22 nt, Homo sapiens
ccucccacacccaaggcuugca

SEQ ID NO: 4295 - RNA, 22 nt, Homo sapiens
ugcaagccuugggugugggagg

SEQ ID NO: 4296 - RNA, 22 nt, Homo sapiens
caugccuugaguguaggaccgu

SEQ ID NO: 4297 - RNA, 22 nt, Homo sapiens
acgguccuacacucaaggcaug

SEQ ID NO: 4298 - RNA, 22 nt, Homo sapiens
aucauacaaggacaauuucuuu

SEQ ID NO: 4299 - RNA, 22 nt, Homo sapiens
aaagaaauuguccuuguaugau

SEQ ID NO: 4300 - RNA, 22 nt, Homo sapiens
ggagaaauuauccuuggugugu

SEQ ID NO: 4301 - RNA, 22 nt, Homo sapiens
acacaccaaggauaauuucucc

SEQ ID NO: 4302 - RNA, 22 nt, Homo sapiens
uggugggcacagaaucuggacu

SEQ ID NO: 4303 - RNA, 22 nt, Homo sapiens
aguccagauucugugcccacca

SEQ ID NO: 4304 - RNA, 25 nt, Homo sapiens
aaaggauucugcugucggucccacu

SEQ ID NO: 4305 - RNA, 25 nt, Homo sapiens
agugggaccgacagcagaauccuuu

SEQ ID NO: 4306 - RNA, 23 nt, Homo sapiens
ucggggaucaucaugucacgaga

SEQ ID NO: 4307 - RNA, 23 nt, Homo sapiens
ucucgugacaugaugauccccga

SEQ ID NO: 4308 - RNA, 22 nt, Homo sapiens
aaacauucgcggugcacuucuu

SEQ ID NO: 4309 - RNA, 22 nt, Homo sapiens
aagaagugcaccgcgaauguuu

SEQ ID NO: 4310 - RNA, 22 nt, Homo sapiens
auucugcauuuuuagcaaguuc

SEQ ID NO: 4311 - RNA, 22 nt, Homo sapiens
gaacuugcuaaaaaugcagaau

SEQ ID NO: 4312 - RNA, 22 nt, Homo sapiens
accugagguugugcauuucuaa

SEQ ID NO: 4313 - RNA, 22 nt, Homo sapiens
uuagaaaugcacaaccucaggu

SEQ ID NO: 4314 - RNA, 22 nt, Homo sapiens
ucagcaaacauuuauugugugc

SEQ ID NO: 4315 - RNA, 22 nt, Homo sapiens
gcacacaauaaauguuugcuga

SEQ ID NO: 4316 - RNA, 22 nt, Homo sapiens
ucaguaaauguuuauuagauga

SEQ ID NO: 4317 - RNA, 22 nt, Homo sapiens
ucaucuaauaaacauuuacuga

SEQ ID NO: 4318 - RNA, 22 nt, Homo sapiens
agcuacaguuacuuuugcacca

SEQ ID NO: 4319 - RNA, 22 nt, Homo sapiens
uggugcaaaaguaacuguagcu

SEQ ID NO: 4320 - RNA, 20 nt, Homo sapiens
uaaaaacugcaauuacuuuc

SEQ ID NO: 4321 - RNA, 20 nt, Homo sapiens
gaaaguaauugcaguuuuua

SEQ ID NO: 4322 - RNA, 23 nt, Homo sapiens
ugcaaaaguaauugcaguuuuug

SEQ ID NO: 4323 - RNA, 23 nt, Homo sapiens
caaaaacugcaauuacuuuugca

SEQ ID NO: 4324 - RNA, 22 nt, Homo sapiens
aaagaccgugacuacuuuugca

SEQ ID NO: 4325 - RNA, 22 nt, Homo sapiens
ugcaaaaguagucacggucuuu

SEQ ID NO: 4326 - RNA, 22 nt, Homo sapiens
agaaguaacuacgguuuuugca

SEQ ID NO: 4327 - RNA, 22 nt, Homo sapiens
ugcaaaaaccguaguuacuucu

SEQ ID NO: 4328 - RNA, 19 nt, Homo sapiens
aaaaaccacaauuacuuuu

SEQ ID NO: 4329 - RNA, 19 nt, Homo sapiens
aaaaguaauugugguuuuu

SEQ ID NO: 4330 - RNA, 19 nt, Homo sapiens
aaaaguaauugcggucuuu

SEQ ID NO: 4331 - RNA, 19 nt, Homo sapiens
aaagaccgcaauuacuuuu

SEQ ID NO: 4332 - RNA, 22 nt, Homo sapiens
caaaaacugcaauuacuuuugc

SEQ ID NO: 4333 - RNA, 22 nt, Homo sapiens
gcaaaaguaauugcaguuuuug

SEQ ID NO: 4334 - RNA, 22 nt, Homo sapiens
gaaaguaauugcuguuuuugcc

SEQ ID NO: 4335 - RNA, 22 nt, Homo sapiens
ggcaaaaacagcaauuacuuuc

SEQ ID NO: 4336 - RNA, 21 nt, Homo sapiens
uaaaacugcaguuauuuuugc

SEQ ID NO: 4337 - RNA, 21 nt, Homo sapiens
gcaaaaauaacugcaguuuua

SEQ ID NO: 4338 - RNA, 21 nt, Homo sapiens
aaaaguaauugcaguuuuugc

SEQ ID NO: 4339 - RNA, 21 nt, Homo sapiens
gcaaaaacugcaauuacuuuu

SEQ ID NO: 4340 - RNA, 22 nt, Homo sapiens
uaaaacccacaauuauguuugu

SEQ ID NO: 4341 - RNA, 22 nt, Homo sapiens
acaaacauaauuguggguuuua

SEQ ID NO: 4342 - RNA, 22 nt, Homo sapiens
aaaaguaauugcggguuuugcc

SEQ ID NO: 4343 - RNA, 22 nt, Homo sapiens
ggcaaaacccgcaauuacuuuu

SEQ ID NO: 4344 - RNA, 21 nt, Homo sapiens
caaaaccgcaguaacuuuugu

SEQ ID NO: 4345 - RNA, 21 nt, Homo sapiens
acaaaaguuacugcgguuuug

SEQ ID NO: 4346 - RNA, 22 nt, Homo sapiens
aaaaguuauugcgguuuuggcu

SEQ ID NO: 4347 - RNA, 22 nt, Homo sapiens
agccaaaaccgcaauaacuuuu

SEQ ID NO: 4348 - RNA, 21 nt, Homo sapiens
uggcaguuacuuuugcaccag

SEQ ID NO: 4349 - RNA, 21 nt, Homo sapiens
cuggugcaaaaguaacugcca

SEQ ID NO: 4350 - RNA, 21 nt, Homo sapiens
aaaaguaauugcgguuuuugc

SEQ ID NO: 4351 - RNA, 21 nt, Homo sapiens
gcaaaaaccgcaauuacuuuu

SEQ ID NO: 4352 - RNA, 20 nt, Homo sapiens
aaaacugcaguuacuuuugc

SEQ ID NO: 4353 - RNA, 20 nt, Homo sapiens
gcaaaaguaacugcaguuuu

SEQ ID NO: 4354 - RNA, 18 nt, Homo sapiens
aaaaguacuugcggauuu

SEQ ID NO: 4355 - RNA, 18 nt, Homo sapiens
aaauccgcaaguacuuuu

SEQ ID NO: 4356 - RNA, 20 nt, Homo sapiens
gugcaaaagucaucacgguu

SEQ ID NO: 4357 - RNA, 20 nt, Homo sapiens
aaccgugaugacuuuugcac

SEQ ID NO: 4358 - RNA, 22 nt, Homo sapiens
gcuggugcaaaaguaauggcgg

SEQ ID NO: 4359 - RNA, 22 nt, Homo sapiens
ccgccauuacuuuugcaccagc

SEQ ID NO: 4360 - RNA, 22 nt, Homo sapiens
aaaaguaaucacuguuuuugcc

SEQ ID NO: 4361 - RNA, 22 nt, Homo sapiens
ggcaaaaacagugauuacuuuu

SEQ ID NO: 4362 - RNA, 20 nt, Homo sapiens
agugccugagggaguaagag

SEQ ID NO: 4363 - RNA, 20 nt, Homo sapiens
cucuuacucccucaggcacu

SEQ ID NO: 4364 - RNA, 22 nt, Homo sapiens
ugucuuacucccucaggcacau

SEQ ID NO: 4365 - RNA, 22 nt, Homo sapiens
augugccugagggaguaagaca

SEQ ID NO: 4366 - RNA, 23 nt, Homo sapiens
agugccugagggaguaagagccc

SEQ ID NO: 4367 - RNA, 23 nt, Homo sapiens
gggcucuuacucccucaggcacu

SEQ ID NO: 4368 - RNA, 21 nt, Homo sapiens
gcgacccacucuugguuucca

SEQ ID NO: 4369 - RNA, 21 nt, Homo sapiens
uggaaaccaagagugggucgc

SEQ ID NO: 4370 - RNA, 22 nt, Homo sapiens
uuagcuuaaggaguaccagauc

SEQ ID NO: 4371 - RNA, 22 nt, Homo sapiens
gaucugguacuccuuaagcuaa

SEQ ID NO: 4372 - RNA, 21 nt, Homo sapiens
uaugguacuccuuaagcuaac

SEQ ID NO: 4373 - RNA, 21 nt, Homo sapiens
guuagcuuaaggaguaccaua

SEQ ID NO: 4374 - RNA, 19 nt, Homo sapiens
ugagcugcuguaccaaaau

SEQ ID NO: 4375 - RNA, 19 nt, Homo sapiens
auuuugguacagcagcuca

SEQ ID NO: 4376 - RNA, 22 nt, Homo sapiens
cacauaugaagugagccagcac

SEQ ID NO: 4377 - RNA, 22 nt, Homo sapiens
gugcuggcucacuucauaugug

SEQ ID NO: 4378 - RNA, 22 nt, Homo sapiens
ugcuggcucauuucauaugugu

SEQ ID NO: 4379 - RNA, 22 nt, Homo sapiens
acacauaugaaaugagccagca

SEQ ID NO: 4380 - RNA, 22 nt, Homo sapiens
uuccaugccuccuagaaguucc

SEQ ID NO: 4381 - RNA, 22 nt, Homo sapiens
ggaacuucuaggaggcauggaa

SEQ ID NO: 4382 - RNA, 22 nt, Homo sapiens
agccuuccaggagaaauggaga

SEQ ID NO: 4383 - RNA, 22 nt, Homo sapiens
ucuccauuucuccuggaaggcu

SEQ ID NO: 4384 - RNA, 22 nt, Homo sapiens
uaaaacuuuaagugugccuagg

SEQ ID NO: 4385 - RNA, 22 nt, Homo sapiens
ccuaggcacacuuaaaguuuua

SEQ ID NO: 4386 - RNA, 22 nt, Homo sapiens
uaggcacacuuaaaguuauagc

SEQ ID NO: 4387 - RNA, 22 nt, Homo sapiens
gcuauaacuuuaagugugccua

SEQ ID NO: 4388 - RNA, 22 nt, Homo sapiens
gaauauggguauauuaguuugg

SEQ ID NO: 4389 - RNA, 22 nt, Homo sapiens
ccaaacuaauauacccauauuc

SEQ ID NO: 4390 - RNA, 22 nt, Homo sapiens
aaacuaauauacccauauucug

SEQ ID NO: 4391 - RNA, 22 nt, Homo sapiens
cagaauauggguauauuaguuu

SEQ ID NO: 4392 - RNA, 22 nt, Homo sapiens
uaguucuucccuuugcccaauu

SEQ ID NO: 4393 - RNA, 22 nt, Homo sapiens
aauugggcaaagggaagaacua

SEQ ID NO: 4394 - RNA, 22 nt, Homo sapiens
cagggaaaugggaagaacuaga

SEQ ID NO: 4395 - RNA, 22 nt, Homo sapiens
ucuaguucuucccauuucccug

SEQ ID NO: 4396 - RNA, 22 nt, Homo sapiens
cugaauagcugggacuacaggu

SEQ ID NO: 4397 - RNA, 22 nt, Homo sapiens
accuguagucccagcuauucag

SEQ ID NO: 4398 - RNA, 22 nt, Homo sapiens
ugaaguaccagcuacucgagag

SEQ ID NO: 4399 - RNA, 22 nt, Homo sapiens
cucucgaguagcugguacuuca

SEQ ID NO: 4400 - RNA, 22 nt, Homo sapiens
cagagugacaagcugguuaaag

SEQ ID NO: 4401 - RNA, 22 nt, Homo sapiens
cuuuaaccagcuugucacucug

SEQ ID NO: 4402 - RNA, 22 nt, Homo sapiens
uauccagcuuguuacuauaugc

SEQ ID NO: 4403 - RNA, 22 nt, Homo sapiens
gcauauaguaacaagcuggaua

SEQ ID NO: 4404 - RNA, 21 nt, Homo sapiens
gccccgggcagugugaucauc

SEQ ID NO: 4405 - RNA, 21 nt, Homo sapiens
gaugaucacacugcccggggc

SEQ ID NO: 4406 - RNA, 18 nt, Homo sapiens
auggucaccuccgggacu

SEQ ID NO: 4407 - RNA, 18 nt, Homo sapiens
agucccggaggugaccau

SEQ ID NO: 4408 - RNA, 19 nt, Homo sapiens
aagucccacuaaugccagc

SEQ ID NO: 4409 - RNA, 19 nt, Homo sapiens
gcuggcauuagugggacuu

SEQ ID NO: 4410 - RNA, 21 nt, Homo sapiens
acuggcauuagugggacuuuu

SEQ ID NO: 4411 - RNA, 21 nt, Homo sapiens
aaaagucccacuaaugccagu

SEQ ID NO: 4412 - RNA, 23 nt, Homo sapiens
ugcacauggcaaccuagcuccca

SEQ ID NO: 4413 - RNA, 23 nt, Homo sapiens
ugggagcuagguugccaugugca

SEQ ID NO: 4414 - RNA, 21 nt, Homo sapiens
ggcugggugcucuugugcagu

SEQ ID NO: 4415 - RNA, 21 nt, Homo sapiens
acugcacaagagcacccagcc

SEQ ID NO: 4416 - RNA, 21 nt, Homo sapiens
uaaaguaaauaugcaccaaaa

SEQ ID NO: 4417 - RNA, 21 nt, Homo sapiens
uuuuggugcauauuuacuuua

SEQ ID NO: 4418 - RNA, 21 nt, Homo sapiens
aauaaaguucauguauggcaa

SEQ ID NO: 4419 - RNA, 21 nt, Homo sapiens
uugccauacaugaacuuuauu

SEQ ID NO: 4420 - RNA, 21 nt, Homo sapiens
uugccauacauagacuuuauu

SEQ ID NO: 4421 - RNA, 21 nt, Homo sapiens
aauaaagucuauguauggcaa

SEQ ID NO: 4422 - RNA, 21 nt, Homo sapiens
auacccauagcuuagcuccca

SEQ ID NO: 4423 - RNA, 21 nt, Homo sapiens
ugggagcuaagcuauggguau

SEQ ID NO: 4424 - RNA, 21 nt, Homo sapiens
ugggagcuaagcuauggguau

SEQ ID NO: 4425 - RNA, 21 nt, Homo sapiens
auacccauagcuuagcuccca

SEQ ID NO: 4426 - RNA, 22 nt, Homo sapiens
caaaguuuaagauccuugaagu

SEQ ID NO: 4427 - RNA, 22 nt, Homo sapiens
acuucaaggaucuuaaacuuug

SEQ ID NO: 4428 - RNA, 22 nt, Homo sapiens
aucaaggaucuuaaacuuugcc

SEQ ID NO: 4429 - RNA, 22 nt, Homo sapiens
ggcaaaguuuaagauccuugau

SEQ ID NO: 4430 - RNA, 20 nt, Homo sapiens
aaaguagcuguaccauuugc

SEQ ID NO: 4431 - RNA, 20 nt, Homo sapiens
gcaaaugguacagcuacuuu

SEQ ID NO: 4432 - RNA, 19 nt, Homo sapiens
aggcacggugucagcaggc

SEQ ID NO: 4433 - RNA, 19 nt, Homo sapiens
gccugcugacaccgugccu

SEQ ID NO: 4434 - RNA, 19 nt, Homo sapiens
gggcgccugugaucccaac

SEQ ID NO: 4435 - RNA, 19 nt, Homo sapiens
guugggaucacaggcgccc

SEQ ID NO: 4436 - RNA, 23 nt, Homo sapiens
aguauguucuuccaggacagaac

SEQ ID NO: 4437 - RNA, 23 nt, Homo sapiens
guucuguccuggaagaacauacu

SEQ ID NO: 4438 - RNA, 22 nt, Homo sapiens
gagaaaugcuggacuaaucugc

SEQ ID NO: 4439 - RNA, 22 nt, Homo sapiens
gcagauuaguccagcauuucuc

SEQ ID NO: 4440 - RNA, 22 nt, Homo sapiens
agaaaggguggcaauaccucuu

SEQ ID NO: 4441 - RNA, 22 nt, Homo sapiens
aagagguauugccacccuuucu

SEQ ID NO: 4442 - RNA, 22 nt, Homo sapiens
agguauugccacccuuucuagu

SEQ ID NO: 4443 - RNA, 22 nt, Homo sapiens
acuagaaaggguggcaauaccu

SEQ ID NO: 4444 - RNA, 22 nt, Homo sapiens
guagcaccuugcaggauaaggu

SEQ ID NO: 4445 - RNA, 22 nt, Homo sapiens
accuuauccugcaaggugcuac

SEQ ID NO: 4446 - RNA, 24 nt, Homo sapiens
uacagaugcagauucucugacuuc

SEQ ID NO: 4447 - RNA, 24 nt, Homo sapiens
gaagucagagaaucugcaucugua

SEQ ID NO: 4448 - RNA, 20 nt, Homo sapiens
aacucuagccugagcaacag

SEQ ID NO: 4449 - RNA, 20 nt, Homo sapiens
cuguugcucaggcuagaguu

SEQ ID NO: 4450 - RNA, 22 nt, Homo sapiens
acagcccagcaguuaucacggg

SEQ ID NO: 4451 - RNA, 22 nt, Homo sapiens
cccgugauaacugcugggcugu

SEQ ID NO: 4452 - RNA, 21 nt, Homo sapiens
uaucguaucguauuguauugu

SEQ ID NO: 4453 - RNA, 21 nt, Homo sapiens
acaauacaauacgauacgaua

SEQ ID NO: 4454 - RNA, 22 nt, Homo sapiens
uuagaacguuuuagggucaaau

SEQ ID NO: 4455 - RNA, 22 nt, Homo sapiens
auuugacccuaaaacguucuaa

SEQ ID NO: 4456 - RNA, 22 nt, Homo sapiens
uaacaaacaccuguaaaacagc

SEQ ID NO: 4457 - RNA, 22 nt, Homo sapiens
gcuguuuuacagguguuuguua

SEQ ID NO: 4458 - RNA, 22 nt, Homo sapiens
agcauacaccuguaguccuaga

SEQ ID NO: 4459 - RNA, 22 nt, Homo sapiens
ucuaggacuacagguguaugcu

SEQ ID NO: 4460 - RNA, 21 nt, Homo sapiens
aguuaaugaauccuggaaagu

SEQ ID NO: 4461 - RNA, 21 nt, Homo sapiens
acuuuccaggauucauuaacu

SEQ ID NO: 4462 - RNA, 21 nt, Homo sapiens
ucagcuacuaccucuauuagg

SEQ ID NO: 4463 - RNA, 21 nt, Homo sapiens
ccuaauagagguaguagcuga

SEQ ID NO: 4464 - RNA, 22 nt, Homo sapiens
uugcucugagcuccgagaaagc

SEQ ID NO: 4465 - RNA, 22 nt, Homo sapiens
gcuuucucggagcucagagcaa

SEQ ID NO: 4466 - RNA, 22 nt, Homo sapiens
caaauaauaccacagugggugu

SEQ ID NO: 4467 - RNA, 22 nt, Homo sapiens
acacccacugugguauuauuug

SEQ ID NO: 4468 - RNA, 20 nt, Homo sapiens
aauaauaucacaguaggugu

SEQ ID NO: 4469 - RNA, 20 nt, Homo sapiens
acaccuacugugauauuauu

SEQ ID NO: 4470 - RNA, 22 nt, Homo sapiens
aauaauaucacaguagguguac

SEQ ID NO: 4471 - RNA, 22 nt, Homo sapiens
guacaccuacugugauauuauu

SEQ ID NO: 4472 - RNA, 22 nt, Homo sapiens
gcaguggcucugaaaugaacuc

SEQ ID NO: 4473 - RNA, 22 nt, Homo sapiens
gaguucauuucagagccacugc

SEQ ID NO: 4474 - RNA, 21 nt, Homo sapiens
cagaucaugggacugucucag

SEQ ID NO: 4475 - RNA, 21 nt, Homo sapiens
cugagacagucccaugaucug

SEQ ID NO: 4476 - RNA, 22 nt, Homo sapiens
acuccaagaagaaucuagacag

SEQ ID NO: 4477 - RNA, 22 nt, Homo sapiens
cugucuagauucuucuuggagu

SEQ ID NO: 4478 - RNA, 22 nt, Homo sapiens
cucauuuaaguagucugaugcc

SEQ ID NO: 4479 - RNA, 22 nt, Homo sapiens
ggcaucagacuacuuaaaugag

SEQ ID NO: 4480 - RNA, 22 nt, Homo sapiens
ucaaguaguuucaugauaaagg

SEQ ID NO: 4481 - RNA, 22 nt, Homo sapiens
ccuuuaucaugaaacuacuuga

SEQ ID NO: 4482 - RNA, 22 nt, Homo sapiens
ugggggagugcagugauugugg

SEQ ID NO: 4483 - RNA, 22 nt, Homo sapiens
ccacaaucacugcacuccccca

SEQ ID NO: 4484 - RNA, 22 nt, Homo sapiens
uccugucuuuccuuguuggagc

SEQ ID NO: 4485 - RNA, 22 nt, Homo sapiens
gcuccaacaaggaaagacagga

SEQ ID NO: 4486 - RNA, 22 nt, Homo sapiens
uaaugcauuaaauuauugaagg

SEQ ID NO: 4487 - RNA, 22 nt, Homo sapiens
ccuucaauaauuuaaugcauua

SEQ ID NO: 4488 - RNA, 19 nt, Homo sapiens
uuauugucacguucugauu

SEQ ID NO: 4489 - RNA, 19 nt, Homo sapiens
aaucagaacgugacaauaa

SEQ ID NO: 4490 - RNA, 22 nt, Homo sapiens
ugagucagcaacauaucccaug

SEQ ID NO: 4491 - RNA, 22 nt, Homo sapiens
caugggauauguugcugacuca

SEQ ID NO: 4492 - RNA, 18 nt, Homo sapiens
aggagaagucgggaaggu

SEQ ID NO: 4493 - RNA, 18 nt, Homo sapiens
accuucccgacuucuccu

SEQ ID NO: 4494 - RNA, 22 nt, Homo sapiens
cgaaaacagcaauuaccuuugc

SEQ ID NO: 4495 - RNA, 22 nt, Homo sapiens
gcaaagguaauugcuguuuucg

SEQ ID NO: 4496 - RNA, 22 nt, Homo sapiens
uuaggccaucaucccauuaugc

SEQ ID NO: 4497 - RNA, 22 nt, Homo sapiens
gcauaaugggaugauggccuaa

SEQ ID NO: 4498 - RNA, 23 nt, Homo sapiens
uguuucggggcucauggccugug

SEQ ID NO: 4499 - RNA, 23 nt, Homo sapiens
cacaggccaugagccccgaaaca

SEQ ID NO: 4500 - RNA, 22 nt, Homo sapiens
aaagguaauugcaguuuuuccc

SEQ ID NO: 4501 - RNA, 22 nt, Homo sapiens
gggaaaaacugcaauuaccuuu

SEQ ID NO: 4502 - RNA, 22 nt, Homo sapiens
uucuggauaacaugcugaagcu

SEQ ID NO: 4503 - RNA, 22 nt, Homo sapiens
agcuucagcauguuauccagaa

SEQ ID NO: 4504 - RNA, 22 nt, Homo sapiens
acguuugaaugcuguacaaggc

SEQ ID NO: 4505 - RNA, 22 nt, Homo sapiens
gccuuguacagcauucaaacgu

SEQ ID NO: 4506 - RNA, 20 nt, Homo sapiens
augagcgacugugccugacc

SEQ ID NO: 4507 - RNA, 20 nt, Homo sapiens
ggucaggcacagucgcucau

SEQ ID NO: 4508 - RNA, 19 nt, Homo sapiens
gagccaguuggacaggagc

SEQ ID NO: 4509 - RNA, 19 nt, Homo sapiens
gcuccuguccaacuggcuc

SEQ ID NO: 4510 - RNA, 23 nt, Homo sapiens
uucauuugguauaaaccgcgauu

SEQ ID NO: 4511 - RNA, 23 nt, Homo sapiens
aaucgcgguuuauaccaaaugaa

SEQ ID NO: 4512 - RNA, 22 nt, Homo sapiens
uugagaaugaugaaucauuagg

SEQ ID NO: 4513 - RNA, 22 nt, Homo sapiens
ccuaaugauucaucauucucaa

SEQ ID NO: 4514 - RNA, 23 nt, Homo sapiens
uuacaguuguucaaccaguuacu

SEQ ID NO: 4515 - RNA, 23 nt, Homo sapiens
aguaacugguugaacaacuguaa

SEQ ID NO: 4516 - RNA, 21 nt, Homo sapiens
caaagaggaaggucccauuac

SEQ ID NO: 4517 - RNA, 21 nt, Homo sapiens
guaaugggaccuuccucuuug

SEQ ID NO: 4518 - RNA, 22 nt, Homo sapiens
ucaguuccaggccaaccaggcu

SEQ ID NO: 4519 - RNA, 22 nt, Homo sapiens
agccugguuggccuggaacuga

SEQ ID NO: 4520 - RNA, 22 nt, Homo sapiens
uuaugguuugccugggacugag

SEQ ID NO: 4521 - RNA, 22 nt, Homo sapiens
cucagucccaggcaaaccauaa

SEQ ID NO: 4522 - RNA, 19 nt, Homo sapiens
ugggcguaucuguaugcua

SEQ ID NO: 4523 - RNA, 19 nt, Homo sapiens
uagcauacagauacgccca

SEQ ID NO: 4524 - RNA, 20 nt, Homo sapiens
agaccauggguucucauugu

SEQ ID NO: 4525 - RNA, 20 nt, Homo sapiens
acaaugagaacccauggucu

SEQ ID NO: 4526 - RNA, 22 nt, Homo sapiens
uugugucaauaugcgaugaugu

SEQ ID NO: 4527 - RNA, 22 nt, Homo sapiens
acaucaucgcauauugacacaa

SEQ ID NO: 4528 - RNA, 19 nt, Homo sapiens
ugucucugcugggguuucu

SEQ ID NO: 4529 - RNA, 19 nt, Homo sapiens
agaaaccccagcagagaca

SEQ ID NO: 4530 - RNA, 25 nt, Homo sapiens
aggcaccagccaggcauugcucagc

SEQ ID NO: 4531 - RNA, 25 nt, Homo sapiens
gcugagcaaugccuggcuggugccu

SEQ ID NO: 4532 - RNA, 21 nt, Homo sapiens
gaagugugccguggugugucu

SEQ ID NO: 4533 - RNA, 21 nt, Homo sapiens
agacacaccacggcacacuuc

SEQ ID NO: 4534 - RNA, 21 nt, Homo sapiens
aagccugcccggcuccucggg

SEQ ID NO: 4535 - RNA, 21 nt, Homo sapiens
cccgaggagccgggcaggcuu

SEQ ID NO: 4536 - RNA, 20 nt, Homo sapiens
guugugucaguuuaucaaac

SEQ ID NO: 4537 - RNA, 20 nt, Homo sapiens
guuugauaaacugacacaac

SEQ ID NO: 4538 - RNA, 22 nt, Homo sapiens
uggucuaggauuguuggaggag

SEQ ID NO: 4539 - RNA, 22 nt, Homo sapiens
cuccuccaacaauccuagacca

SEQ ID NO: 4540 - RNA, 22 nt, Homo sapiens
cacacacugcaauuacuuuugc

SEQ ID NO: 4541 - RNA, 22 nt, Homo sapiens
gcaaaaguaauugcagugugug

SEQ ID NO: 4542 - RNA, 25 nt, Homo sapiens
aggggugguguugggacagcuccgu

SEQ ID NO: 4543 - RNA, 25 nt, Homo sapiens
acggagcugucccaacaccaccccu

SEQ ID NO: 4544 - RNA, 21 nt, Homo sapiens
ugagcuaaaugugugcuggga

SEQ ID NO: 4545 - RNA, 21 nt, Homo sapiens
ucccagcacacauuuagcuca

SEQ ID NO: 4546 - RNA, 23 nt, Homo sapiens
gcgaggaccccucggggucugac

SEQ ID NO: 4547 - RNA, 23 nt, Homo sapiens
gucagaccccgagggguccucgc

SEQ ID NO: 4548 - RNA, 25 nt, Homo sapiens
gcugggcagggcuucugagcuccuu

SEQ ID NO: 4549 - RNA, 25 nt, Homo sapiens
aaggagcucagaagcccugcccagc

SEQ ID NO: 4550 - RNA, 20 nt, Homo sapiens
gggaaaaggaagggggagga

SEQ ID NO: 4551 - RNA, 20 nt, Homo sapiens
uccucccccuuccuuuuccc

SEQ ID NO: 4552 - RNA, 20 nt, Homo sapiens
gcggaaggcggagcggcgga

SEQ ID NO: 4553 - RNA, 20 nt, Homo sapiens
uccgccgcuccgccuuccgc

SEQ ID NO: 4554 - RNA, 18 nt, Homo sapiens
gugaaggcccggcggaga

SEQ ID NO: 4555 - RNA, 18 nt, Homo sapiens
ucuccgccgggccuucac

SEQ ID NO: 4556 - RNA, 19 nt, Homo sapiens
ugagggagugggugggagg

SEQ ID NO: 4557 - RNA, 19 nt, Homo sapiens
ccucccacccacucccuca

SEQ ID NO: 4558 - RNA, 19 nt, Homo sapiens
acuggaauuggagucaaaa

SEQ ID NO: 4559 - RNA, 19 nt, Homo sapiens
uuuugacuccaauuccagu

SEQ ID NO: 4560 - RNA, 19 nt, Homo sapiens
ugagggaguuggguguaua

SEQ ID NO: 4561 - RNA, 19 nt, Homo sapiens
uauacacccaacucccuca

SEQ ID NO: 4562 - RNA, 19 nt, Homo sapiens
ugagggaguggauuguaug

SEQ ID NO: 4563 - RNA, 19 nt, Homo sapiens
cauacaauccacucccuca

SEQ ID NO: 4564 - RNA, 19 nt, Homo sapiens
ggcuggucagaugggagug

SEQ ID NO: 4565 - RNA, 19 nt, Homo sapiens
cacucccaucugaccagcc

SEQ ID NO: 4566 - RNA, 19 nt, Homo sapiens
agcagggcuggggauugca

SEQ ID NO: 4567 - RNA, 19 nt, Homo sapiens
ugcaauccccagcccugcu

SEQ ID NO: 4568 - RNA, 19 nt, Homo sapiens
ugagggaggagguugggua

SEQ ID NO: 4569 - RNA, 19 nt, Homo sapiens
uacccaaccuccucccuca

SEQ ID NO: 4570 - RNA, 19 nt, Homo sapiens
ugaggugguaggauguaga

SEQ ID NO: 4571 - RNA, 19 nt, Homo sapiens
ucuacauccuaccaccuca

SEQ ID NO: 4572 - RNA, 22 nt, Homo sapiens
uccgagccugggucucccucuu

SEQ ID NO: 4573 - RNA, 22 nt, Homo sapiens
aagagggagacccaggcucgga

SEQ ID NO: 4574 - RNA, 22 nt, Homo sapiens
ggggguccccggugcucggauc

SEQ ID NO: 4575 - RNA, 22 nt, Homo sapiens
gauccgagcaccggggaccccc

SEQ ID NO: 4576 - RNA, 22 nt, Homo sapiens
agucauuggaggguuugagcag

SEQ ID NO: 4577 - RNA, 22 nt, Homo sapiens
cugcucaaacccuccaaugacu

SEQ ID NO: 4578 - RNA, 19 nt, Homo sapiens
cagcaggaggugaggggag

SEQ ID NO: 4579 - RNA, 19 nt, Homo sapiens
cuccccucaccuccugcug

SEQ ID NO: 4580 - RNA, 22 nt, Homo sapiens
acucaaaacccuucagugacuu

SEQ ID NO: 4581 - RNA, 22 nt, Homo sapiens
aagucacugaaggguuuugagu

SEQ ID NO: 4582 - RNA, 22 nt, Homo sapiens
agacuucccauuugaagguggc

SEQ ID NO: 4583 - RNA, 22 nt, Homo sapiens
gccaccuucaaaugggaagucu

SEQ ID NO: 4584 - RNA, 23 nt, Homo sapiens
aaacucuacuuguccuucugagu

SEQ ID NO: 4585 - RNA, 23 nt, Homo sapiens
acucagaaggacaaguagaguuu

SEQ ID NO: 4586 - RNA, 21 nt, Homo sapiens
ggcuagcaacagcgcuuaccu

SEQ ID NO: 4587 - RNA, 21 nt, Homo sapiens
agguaagcgcuguugcuagcc

SEQ ID NO: 4588 - RNA, 21 nt, Homo sapiens
acagucugcugagguuggagc

SEQ ID NO: 4589 - RNA, 21 nt, Homo sapiens
gcuccaaccucagcagacugu

SEQ ID NO: 4590 - RNA, 23 nt, Homo sapiens
aucccuugcaggggcuguugggu

SEQ ID NO: 4591 - RNA, 23 nt, Homo sapiens
acccaacagccccugcaagggau

SEQ ID NO: 4592 - RNA, 22 nt, Homo sapiens
gugagucucuaagaaaagagga

SEQ ID NO: 4593 - RNA, 22 nt, Homo sapiens
uccucuuuucuuagagacucac

SEQ ID NO: 4594 - RNA, 21 nt, Homo sapiens
ucuaguaagaguggcagucga

SEQ ID NO: 4595 - RNA, 21 nt, Homo sapiens
ucgacugccacucuuacuaga

SEQ ID NO: 4596 - RNA, 22 nt, Homo sapiens
augcugacauauuuacuagagg

SEQ ID NO: 4597 - RNA, 22 nt, Homo sapiens
ccucuaguaaauaugucagcau

SEQ ID NO: 4598 - RNA, 22 nt, Homo sapiens
guucucccaacguaagcccagc

SEQ ID NO: 4599 - RNA, 22 nt, Homo sapiens
gcugggcuuacguugggagaac

SEQ ID NO: 4600 - RNA, 21 nt, Homo sapiens
uggguuuacguugggagaacu

SEQ ID NO: 4601 - RNA, 21 nt, Homo sapiens
aguucucccaacguaaaccca

SEQ ID NO: 4602 - RNA, 19 nt, Homo sapiens
gugucugcuuccuguggga

SEQ ID NO: 4603 - RNA, 19 nt, Homo sapiens
ucccacaggaagcagacac

SEQ ID NO: 4604 - RNA, 23 nt, Homo sapiens
cuaauaguaucuaccacaauaaa

SEQ ID NO: 4605 - RNA, 23 nt, Homo sapiens
uuuauugugguagauacuauuag

SEQ ID NO: 4606 - RNA, 23 nt, Homo sapiens
ugugcuugcucgucccgcccgca

SEQ ID NO: 4607 - RNA, 23 nt, Homo sapiens
ugcgggcgggacgagcaagcaca

SEQ ID NO: 4608 - RNA, 25 nt, Homo sapiens
agggaucgcgggcggguggcggccu

SEQ ID NO: 4609 - RNA, 25 nt, Homo sapiens
aggccgccacccgcccgcgaucccu

SEQ ID NO: 4610 - RNA, 21 nt, Homo sapiens
augauccaggaaccugccucu

SEQ ID NO: 4611 - RNA, 21 nt, Homo sapiens
agaggcagguuccuggaucau

SEQ ID NO: 4612 - RNA, 19 nt, Homo sapiens
aguguggcuuucuuagagc

SEQ ID NO: 4613 - RNA, 19 nt, Homo sapiens
gcucuaagaaagccacacu

SEQ ID NO: 4614 - RNA, 19 nt, Homo sapiens
ucuaggcugguacugcuga

SEQ ID NO: 4615 - RNA, 19 nt, Homo sapiens
ucagcaguaccagccuaga

SEQ ID NO: 4616 - RNA, 19 nt, Homo sapiens
aagcagcugccucugaggc

SEQ ID NO: 4617 - RNA, 19 nt, Homo sapiens
gccucagaggcagcugcuu

SEQ ID NO: 4618 - RNA, 21 nt, Homo sapiens
guggcugcacucacuuccuuc

SEQ ID NO: 4619 - RNA, 21 nt, Homo sapiens
gaaggaagugagugcagccac

SEQ ID NO: 4620 - RNA, 21 nt, Homo sapiens
aggaggcagcgcucucaggac

SEQ ID NO: 4621 - RNA, 21 nt, Homo sapiens
guccugagagcgcugccuccu

SEQ ID NO: 4622 - RNA, 21 nt, Homo sapiens
aauggcgccacuaggguugug

SEQ ID NO: 4623 - RNA, 21 nt, Homo sapiens
cacaacccuaguggcgccauu

SEQ ID NO: 4624 - RNA, 25 nt, Homo sapiens
caacccuaggagagggugccauuca

SEQ ID NO: 4625 - RNA, 25 nt, Homo sapiens
ugaauggcacccucuccuaggguug

SEQ ID NO: 4626 - RNA, 22 nt, Homo sapiens
auaauacaugguuaaccucuuu

SEQ ID NO: 4627 - RNA, 22 nt, Homo sapiens
aaagagguuaaccauguauuau

SEQ ID NO: 4628 - RNA, 21 nt, Homo sapiens
aauauuauacagucaaccucu

SEQ ID NO: 4629 - RNA, 21 nt, Homo sapiens
agagguugacuguauaauauu

SEQ ID NO: 4630 - RNA, 25 nt, Homo sapiens
ggcggagggaaguagguccguuggu

SEQ ID NO: 4631 - RNA, 25 nt, Homo sapiens
accaacggaccuacuucccuccgcc

SEQ ID NO: 4632 - RNA, 24 nt, Homo sapiens
ugccugggucucuggccugcgcgu

SEQ ID NO: 4633 - RNA, 24 nt, Homo sapiens
acgcgcaggccagagacccaggca

SEQ ID NO: 4634 - RNA, 22 nt, Homo sapiens
aggcggggcgccgcgggaccgc

SEQ ID NO: 4635 - RNA, 22 nt, Homo sapiens
gcggucccgcggcgccccgccu

SEQ ID NO: 4636 - RNA, 22 nt, Homo sapiens
gguggcccggccgugccugagg

SEQ ID NO: 4637 - RNA, 22 nt, Homo sapiens
ccucaggcacggccgggccacc

SEQ ID NO: 4638 - RNA, 20 nt, Homo sapiens
accaggaggcugaggccccu

SEQ ID NO: 4639 - RNA, 20 nt, Homo sapiens
aggggccucagccuccuggu

SEQ ID NO: 4640 - RNA, 20 nt, Homo sapiens
gucccugaguguauguggug

SEQ ID NO: 4641 - RNA, 20 nt, Homo sapiens
caccacauacacucagggac

SEQ ID NO: 4642 - RNA, 21 nt, Homo sapiens
uccgguucucagggcuccacc

SEQ ID NO: 4643 - RNA, 21 nt, Homo sapiens
gguggagcccugagaaccgga

SEQ ID NO: 4644 - RNA, 23 nt, Homo sapiens
aggaagcccuggaggggcuggag

SEQ ID NO: 4645 - RNA, 23 nt, Homo sapiens
cuccagccccuccagggcuuccu

SEQ ID NO: 4646 - RNA, 20 nt, Homo sapiens
cuguaugcccucaccgcuca

SEQ ID NO: 4647 - RNA, 20 nt, Homo sapiens
ugagcggugagggcauacag

SEQ ID NO: 4648 - RNA, 23 nt, Homo sapiens
uggugcggagagggcccacagug

SEQ ID NO: 4649 - RNA, 23 nt, Homo sapiens
cacugugggcccucuccgcacca

SEQ ID NO: 4650 - RNA, 22 nt, Homo sapiens
caacuagacugugagcuucuag

SEQ ID NO: 4651 - RNA, 22 nt, Homo sapiens
cuagaagcucacagucuaguug

SEQ ID NO: 4652 - RNA, 23 nt, Homo sapiens
aaggagcuuacaaucuagcuggg

SEQ ID NO: 4653 - RNA, 23 nt, Homo sapiens
cccagcuagauuguaagcuccuu

SEQ ID NO: 4654 - RNA, 22 nt, Homo sapiens
gggacccagggagagacguaag

SEQ ID NO: 4655 - RNA, 22 nt, Homo sapiens
cuuacgucucucccuggguccc

SEQ ID NO: 4656 - RNA, 22 nt, Homo sapiens
gcagagugcaaacaauuuugac

SEQ ID NO: 4657 - RNA, 22 nt, Homo sapiens
gucaaaauuguuugcacucugc

SEQ ID NO: 4658 - RNA, 20 nt, Homo sapiens
cggcucugggucugugggga

SEQ ID NO: 4659 - RNA, 20 nt, Homo sapiens
uccccacagacccagagccg

SEQ ID NO: 4660 - RNA, 22 nt, Homo sapiens
gcagcagggugaaacugacaca

SEQ ID NO: 4661 - RNA, 22 nt, Homo sapiens
ugugucaguuucacccugcugc

SEQ ID NO: 4662 - RNA, 21 nt, Homo sapiens
uggaggagaaggaaggugaug

SEQ ID NO: 4663 - RNA, 21 nt, Homo sapiens
caucaccuuccuucuccucca

SEQ ID NO: 4664 - RNA, 23 nt, Homo sapiens
ucugcucauaccccaugguuucu

SEQ ID NO: 4665 - RNA, 23 nt, Homo sapiens
agaaaccaugggguaugagcaga

SEQ ID NO: 4666 - RNA, 23 nt, Homo sapiens
ugcaccaugguugucugagcaug

SEQ ID NO: 4667 - RNA, 23 nt, Homo sapiens
caugcucagacaaccauggugca

SEQ ID NO: 4668 - RNA, 23 nt, Homo sapiens
cugggaucuccggggucuugguu

SEQ ID NO: 4669 - RNA, 23 nt, Homo sapiens
aaccaagaccccggagaucccag

SEQ ID NO: 4670 - RNA, 22 nt, Homo sapiens
ugagaccucuggguucugagcu

SEQ ID NO: 4671 - RNA, 22 nt, Homo sapiens
agcucagaacccagaggucuca

SEQ ID NO: 4672 - RNA, 23 nt, Homo sapiens
uccaguaccacgugucagggcca

SEQ ID NO: 4673 - RNA, 23 nt, Homo sapiens
uggcccugacacgugguacugga

SEQ ID NO: 4674 - RNA, 22 nt, Homo sapiens
ggagacugaugaguucccggga

SEQ ID NO: 4675 - RNA, 22 nt, Homo sapiens
ucccgggaacucaucagucucc

SEQ ID NO: 4676 - RNA, 21 nt, Homo sapiens
gcaggaacuugugagucuccu

SEQ ID NO: 4677 - RNA, 21 nt, Homo sapiens
aggagacucacaaguuccugc

SEQ ID NO: 4678 - RNA, 22 nt, Homo sapiens
cugcccuggcccgagggaccga

SEQ ID NO: 4679 - RNA, 22 nt, Homo sapiens
ucggucccucgggccagggcag

SEQ ID NO: 4680 - RNA, 21 nt, Homo sapiens
ccuggaaacacugagguugug

SEQ ID NO: 4681 - RNA, 21 nt, Homo sapiens
cacaaccucaguguuuccagg

SEQ ID NO: 4682 - RNA, 22 nt, Homo sapiens
uauaccucaguuuuaucaggug

SEQ ID NO: 4683 - RNA, 22 nt, Homo sapiens
caccugauaaaacugagguaua

SEQ ID NO: 4684 - RNA, 22 nt, Homo sapiens
uggugguuuacaaaguaauuca

SEQ ID NO: 4685 - RNA, 22 nt, Homo sapiens
ugaauuacuuuguaaaccacca

SEQ ID NO: 4686 - RNA, 22 nt, Homo sapiens
uggauuucuuugugaaucacca

SEQ ID NO: 4687 - RNA, 22 nt, Homo sapiens
uggugauucacaaagaaaucca

SEQ ID NO: 4688 - RNA, 21 nt, Homo sapiens
uccucuucucccuccucccag

SEQ ID NO: 4689 - RNA, 21 nt, Homo sapiens
cugggaggagggagaagagga

SEQ ID NO: 4690 - RNA, 20 nt, Homo sapiens
guagaggagauggcgcaggg

SEQ ID NO: 4691 - RNA, 20 nt, Homo sapiens
cccugcgccaucuccucuac

SEQ ID NO: 4692 - RNA, 22 nt, Homo sapiens
gugaacgggcgccaucccgagg

SEQ ID NO: 4693 - RNA, 22 nt, Homo sapiens
ccucgggauggcgcccguucac

SEQ ID NO: 4694 - RNA, 22 nt, Homo sapiens
gacugacaccucuuugggugaa

SEQ ID NO: 4695 - RNA, 22 nt, Homo sapiens
uucacccaaagaggugucaguc

SEQ ID NO: 4696 - RNA, 21 nt, Homo sapiens
uacucaaaaagcugucaguca

SEQ ID NO: 4697 - RNA, 21 nt, Homo sapiens
ugacugacagcuuuuugagua

SEQ ID NO: 4698 - RNA, 21 nt, Homo sapiens
uuaauaucggacaaccauugu

SEQ ID NO: 4699 - RNA, 21 nt, Homo sapiens
acaaugguuguccgauauuaa

SEQ ID NO: 4700 - RNA, 22 nt, Homo sapiens
auccgcgcucugacucucugcc

SEQ ID NO: 4701 - RNA, 22 nt, Homo sapiens
ggcagagagucagagcgcggau

SEQ ID NO: 4702 - RNA, 20 nt, Homo sapiens
gugagucaggguggggcugg

SEQ ID NO: 4703 - RNA, 20 nt, Homo sapiens
ccagccccacccugacucac

SEQ ID NO: 4704 - RNA, 22 nt, Homo sapiens
ugcccuuaaaggugaacccagu

SEQ ID NO: 4705 - RNA, 22 nt, Homo sapiens
acuggguucaccuuuaagggca

SEQ ID NO: 4706 - RNA, 22 nt, Homo sapiens
ucuucucuguuuuggccaugug

SEQ ID NO: 4707 - RNA, 22 nt, Homo sapiens
cacauggccaaaacagagaaga

SEQ ID NO: 4708 - RNA, 22 nt, Homo sapiens
aaauuauuguacaucggaugag

SEQ ID NO: 4709 - RNA, 22 nt, Homo sapiens
cucauccgauguacaauaauuu

SEQ ID NO: 4710 - RNA, 22 nt, Homo sapiens
uucaacggguauuuauugagca

SEQ ID NO: 4711 - RNA, 22 nt, Homo sapiens
ugcucaauaaauacccguugaa

SEQ ID NO: 4712 - RNA, 22 nt, Homo sapiens
cuauacaacuuacuacuuuccc

SEQ ID NO: 4713 - RNA, 22 nt, Homo sapiens
gggaaaguaguaaguuguauag

SEQ ID NO: 4714 - RNA, 22 nt, Homo sapiens
ugagguaguaaguuguauuguu

SEQ ID NO: 4715 - RNA, 22 nt, Homo sapiens
aacaauacaacuuacuaccuca

SEQ ID NO: 4716-4733 - skipped (18 entries)

SEQ ID NO: 4734 - DNA, 3131 bp, Adeno-associated virus
gcggccgcgaattcgcccttggctgcgtcaactggaccaatgagaactttcccttcaatgattgcgtcgacaagatggtgatctggtgggaggagggcaagatgacggccaaggtcgtggagtccgccaaggccattctcggcggcagcaaggtgcgcgtggaccaaaagtgcaagtcgtccgcccagatcgaccccacccccgtgatcgtcacctccaacaccaacatgtgcgccgtgattgacgggaacagcaccaccttcgagcaccagcagcctctccaggaccggatgtttaagttcgaactcacccgccgtctggagcacgactttggcaaggtgacaaagcaggaagtcaaagagttcttccgctgggccagtgatcacgtgaccgaggtggcgcatgagttttacgtcagaaagggcggagccagcaaaagacccgcccccgatgacgcggataaaagcgagcccaagcgggcctgcccctcagtcgcggatccatcgacgtcagacgcggaaggagctccggtggactttgccgacaggtaccaaaacaaatgttctcgtcacgcgggcatgcttcagatgctgtttccctgcaaaacgtgcgagagaatgaatcggaatttcaacatttgcttcacacacggggtcagagactgctcagagtgtttccccggcgtgtcagaatctcaaccggtcgtcagaaagaggacgtatcggaaactccgtgcgattcatcatctgctggggcgggctcccgagattgcttgctcggcctgcgatctggtcaacgtggacctggatgactgtgtttctgagcaataaatgacttaaaccaggtatggctgccgatggttatcttccagattggctcgaggacaacctctctgagggcattcgcgagtggtgggcgctgaaacctggagccccgaagcccaaagccaaccagcaaaagcaggacgacggccggggtctggtgcttcctggctacaagtacctcggacccttcaacggactcgacaagggggagcccgtcaacgcggcggacgcagcggccctcgagcacgacaaggcttacgaccagcagctgcaggcgggtgacaatccgtacctgcggtataaccacgccgacgccgagtttcaggagcgtctgcaagaagatacgtcttttgggggcaacctcgggcgagcagtcttccaggccaagaagcgggttctcgaacctctcggtctggttgaggaaggcgctaagacggctcctggaaagaagagaccggtagagccatcaccccagcgttctccagactcctctacgggcatcggcaagaaaggccaacagcccgccagaaaaagactcaattttggtcagactggcgactcagagtcagttccagaccctcaacctctcggagaacctccagcagcgccctctggtgtgggacctaatacaatggctgcaggcggtggcgcaccaatggcagacaataacgaaggcgccgacggagtgggtagttcctcgggaaattggcattgcgattccacatggctgggcgacagagtcatcaccaccagcacccgaacctgggccctgcccacctacaacaaccacctctacaagcaaatctccaacgggacatcgggaggagccaccaacgacaacacctacttcggctacagcaccccctgggggtattttgactttaacagattccactgccacctttcaccacgtgactggcagcgactcatcaacaacaactggggattccgacccaagagactcagcttcaagctcttcaacatccaggtcaaggaggtcacgcagaatgaaggcaccaagaccatcgccaataacctcaccagcaccatccaggtgtttacggactcggagtaccagctgccgtacgttctcggctctgtccaccagggctgcctgcctccgttcccggcggacgtgttcatgattccccagtacggctacctaacactcaacaacggtagtcaggccgtgggacgctcctccttctactgcctggaatactttccttcgcagatgctgagaaccggcaacaacttccagtttacttacaccttcgaggacgtgcctttccacagcagctacgcccacagctagagcttggaccggctgatgaatcctctgattgaccagtacctgtactacttgtctcggactcaaacaacaggaggcacggcaaatacgcagactctgggcttcagccaaggtgggcctaatacaatggccaatcaggcaaagaactggctgccaggaccctgttaccgccaacaacgcgtctcaacgacaaccgggcaaaacaacaatagcaactttgcctggactgctgggaccaaataccatctgaatggaagaaattcattggctaatcctggcatcgctatggcaacacacaaagacgacgaggagcgtttttttcccagtaacgggatcctgatttttggcaaacaaaatgctgccagagacaatgcggattacagcgatgtcatgctcaccagcgaggaagaaatcaaaaccactaaccctgtggctacagaggaatacggtatcgtggcagataacttgcagcagcaaaacacggctcctcaaattggaactgtcaacagccagggggccttacccggtatggtctggcagaaccgggacgtgtacctgcagggtcccatctgggccaagattcctcacacggacggcaacttccacccgtctccgctgatgggcggctttggcctgaaacatcctccgcctcagatcctgatcaagaacacgcctgtacctgcggatcctccgaccaccttcaaccagtcaaagctgaactctttcatcacgcaatacagcaccggacaggtcagcgtggaaattgaatgggagctgcagaaggaaaacagcaagcgctggaaccccgagatccagtacacctccaactactacaaatctataagtgtggactttgctgttaatacagaaggcgtgtactctgaaccccgccccattggcacccgttacctcacccgtaatctgtaattgcctgttaatcaataaaccggttgattcgtttcagttgaactttggtctctgcgaagggcgaattc

SEQ ID NO: 4735 - protein, 728 aa, Adeno-associated virus
MAADGYLPDWLEDNLSEGIREWWDLKPGAPKPKANQQKQDDGRGLVLPGYKYLGPFNGLDKGEPVNEADAAALEHDKAYDKQLEQGDNPYLKYNHADAEFQERLQEDTSFGGNLGRAVFQAKKRVLEPLGLVEEGAKTAPGKKRPIESPDSSTGIGKKGQQPAKKKLNFGQTGDSESVPDPQPLGEPPAAPSGLGSGTMAAGGGAPMADNNEGADGVGNASGNWHCDSTWLGDRVITTSTRTWALPTYNNHLYKQISSQSGATNDNHFFGYSTPWGYFDFNRFHCHFSPRDWQRLINNNWGFRPRKLRFKLFNIQVKEVTTNDGVTTIANNLTSTIQVFSDSEYQLPYVLGSAHQGCLPPFPADVFMIPQYGYLTLNNGSQSMGRSSFYCLEYFPSQMLRTGNNFEFSYTFEEVPFHSSYAHSQSLDRLMNPLIDQYLYYLARTQSTTGSTRELQFHQAGPNTMAEQSKNWLPGPCYRQQRLSKNIDSNNNSNFAWTGATKYHLNGRNSLTNPGVAMATNKDDEGQFFPINGVLVFGKTGAANKTTLENVLMTSEEEIKTTNPVATEEYGVVSSNLQSSTAGPQTQTVNSQGALPGMVWQNRDVYLQGPIWAKIPHTDGNFHPSPLMGGFGLKHPPPQILIKNTPVPANPPGVFTPALFASFITQYSTGQVSVEIEWELQKENSKRWNPEIQYTSNYAKSNNVEFAVNNEGVYTEPRPIGTRYLTRNL

SEQ ID NO: 4736 - protein, 644 aa, Adeno-associated virus
  MOD_RES (434)..(434): Any amino acid
KAYDQQLKAGDNPYLRYNHADAEFQERLQEDTSFGGNLGRAVFQAKKRVLEPLGLVETPAKTAPGKKRPVDSPDSTSGIGKKGQQPAKKRLNFGQTGDSESVPDPQPIGEPPAGPSGLGSGTMAAGGGAPMADNNEGADGVGNASGNWHCDSTWLGDRVITTSTRTWALPTYNNHLYKQISSQSAGSTNDNVYFGYSTPWGYFDFNRFHCHFSPRDWQRLINNNWGFRPKKLNFKLFNIQVKEVTTNDGVTTIANNLTSTVQVFSDSEYQLPYVLGSAHQGCLPPFPADVFMIPQYGYLTLNNGSQSVGRSSFYCLEYFPSQMLRTGNNFTFSYTFEDVPFHSSYAHSQSLDRLMNPLIDQYLYYLARTQSNAGGTAGNRELQFYQGGPTTMAEQAKNWLPGPCFRQQRVSKTLDQNNNSNFAWTGATKYHLNXRNSLVNPGVAMATHKDDEERFFPSSGVLIFGKTGAANKTTLENVLMTNEEEIRPTNPVATEEYGIVSSNLQAASTAAQTQVVNNQGALPGMVWQNRDVYLQGPIWAKIPHTDGNFHPSPLMGGFGLKHPPPQILIKNTPVPANPPEVFTPAKFASFITQYSTGQVSVEIEWELQKENSKRWNPEIQYTSNFDKQTGVDFAVDSQGVYSEP

SEQ ID NO: 4737 - DNA, 1933 bp, Adeno-associated virus
caaggcctacgaccagcagctcaaagcgggtgacaatccgtacctgcggtataaccacgccgacgccgagtttcaggagtgtcttcaagaagatacgtcttttgggggcaacctcgggcgagcagtcttccaggccaaaaagcgggttctcgaacctcttggtctggttgagacgccagctaagacggcacctggaaagaagcgaccggtagactcgccagactccacctcgggcatcggcaagaaaggccagcagcccgcgaaaaagagactcaactttgggcagactggcgactcagagtcagtccccgaccctcaaccaatcggagaaccaccagcaggcccctctggtctgggatctggtacaatggttgcaggcggtggcgcaccaatggctgacaataacgagggcgccgacggagtgggtaatgcctcaggaaattggcattgcgattccacatggctgggcgacagagtcatcaccaccagcacccgaacctgggccctgcccacctacaacaaccacctctacaagcaaatctccagtcagtcagcagggagcaccaacgataacgtctatttcggctacagcaccccctgggggtattttgacttcaacagattccattgccacttctcaccacgtgactggcagcgacttatcaacaacaactggggattccggcccaagaagctcaacttcaagctcttcaacatccaggtcaaggaggtcacgacgaatgacggtgtcacaaccatcgctaataaccttaccagcacggttcaggtcttttcggactcggaatatcaactgccgtacgtcctcggctccgcgcaccagggctgcctgcctccgttcccggcagacgtgttcatgattccgcagtacggatacctgactctgaacaatggcagccaatcggtaggccgttcctccttctactgcctggagtactttccttctcagatgctgagaacgggcaacaacttcacctttagctacaccttcgaggacgtgcctttccacagcagctacgcgcacagccagagtctggaccggctgatgaatcccctcatcgaccagtacctgtactacttggccagaacacagagcaacgcaggaggtactgctggcaatcgggaactgcagttttatcagggcggacctaccaccatggccgaacaagcaaagaactggctgcccggaccttgcttccggcaacagagagtatccaagacgctggatcaaaataacaacagcaactttgcctggactggtgccacaaaataccatttaaatggaagaaattcattggttaatcccggtgtcgccatggcaacccacaaggacgacgaggaacgcttctccccttcgagcggagttctaatttttggcaaaactggagcagctaataaaactacattagaaaacgtgctcatgacaaatgaagaagaaattcgtcctaccaacccggtagctaccgaggaatacgggattgtaagcagcaacttgcaggcggctagcaccgcagcccagacacaagttgttaacaaccagggagccttacctggcatggtctggcagaaccgggacgtgtacctgcaaggtcccatttgggccaagattcctcacacggacggcaactttcacccgtctcctctaatgggtggctttggactgaaacacccgcctccccagatcctgatcaaaaacacgccggtacctgctaatcctccagaagtgtttactcctgccaagtttgcttccttcatcacgcagtacagcaccgggcaagtcagcgttgagatcgagtgggagctgcagaaagagaacagcaagcgctggaacccagagattcagtacacctccaactttgacaaacagactggagtggactttgctgttgacagccagggtgtttactctgagcct

SEQ ID NO: 4738 - protein, 644 aa, Adeno-associated virus
KAYDQQLKAGDNPYLRYNHADAEFQECLQEDTSFGGNLGRAVFQAKKRVLEPLGLVETPAKTAPGKKRPVDSPDSTSGIGKKGQQPAKKRLNFGQTGDSESVPDPQPIGEPPAGPSGLGSGTMVAGGGAPMADNNEGADGVGNASGNWHCDSTWLGDRVITTSTRTWALPTYNNHLYKQISSQSAGSTNDNVYFGYSTPWGYFDFNRFHCHFSPRDWQRLINNNWGFRPKKLNFKLFNIQVKEVTTNDGVTTIANNLTSTVQVFSDSEYQLPYVLGSAHQGCLPPFPADVFMIPQYGYLTLNNGSQSVGRSSFYCLEYFPSQMLRTGNNFTFSYTFEDVPFHSSYAHSQSLDRLMNPLIDQYLYYLARTQSNAGGTAGNRELQFYQGGPTTMAEQAKNWLPGPCFRQQRVSKTLDQNNNSNFAWTGATKYHLNGRNSLVNPGVAMATHKDDEERFSPSSGVLIFGKTGAANKTTLENVLMTNEEEIRPTNPVATEEYGIVSSNLQAASTAAQTQVVNNQGALPGMVWQNRDVYLQGPIWAKIPHTDGNFHPSPLMGGFGLKHPPPQILIKNTPVPANPPEVFTPAKFASFITQYSTGQVSVEIEWELQKENSKRWNPEIQYTSNFDKQTGVDFAVDSQGVYSEP

SEQ ID NO: 4739 - DNA, 1933 bp, Adeno-associated virus
caaggcctacgaccagcagctcaaagcgggtgacaatccgtacctgcggtataaccacgccgacgccgagtttcaggagcgtcttcaagaagatacgtcttttgggggcaacctcgggcgagcagtcttccaggccaaaaagcgggttctcgaacctcttggtctggttgagacgccagctaagacggcacctggaaagaagcgaccggtagactcgccagactccacctcgggcatcggcaagaaaggccagcagcccgcgaaaaagagactcaactttgggcagactggcgactcagagccagtccccgaccctcaaccaatcggagaaccaccagcaggcccctctggtctgggatctggtacaatggctgcaggcggtggcgcaccaatggctgacaataacgagggcgccgacggagtgggtaatgcctcaggaaattggcattgcgattccacacggctgggcgacagagtcatcaccaccagcacccgaacctgggccctgcccacctacaacaaccacctctacaagcaaatctccagtcagtcagcagggagcaccaacgataacgtctatttcggctacagcaccccctgggggtattttgacttcaacagattccattgccacttctcaccacgtgactggcagcgacttatcaacaacaactggggattccggcccaagaagctcaacttcaagctcttcaacatccaggtcaaggaggtcacgacgaatgacggcgtcacaaccatcgctaataaccttaccagcacggttcaggtcttttcggactcggaatatcaactgccgtacgtcctcggctccgcgcaccagggctgcctgcctccgttcccggcagacgtgttcatgattccgcagtacggatacctgactctgaacaatggcagccaatcggtaggccgttcctccttctactgcctggagtactttccttctcagatgctgagaacgggcaacaacttcacctttagctacaccttcgaggacgtgcctttccacagcagctacgcgcacagccagagtctgggccggctgatgaatcccctcatcgaccagtacctgtactacttggccagaacacagagcaacgcaggaggtactgctggcaatcgggaactgcagttttatcagggcggacctaccaccatggccgaacaagcaaagaactggctgcccggaccttgcttccggcaacagagagtatccaagacgctggatcaaaataacaacagcaactttgcctggactggtgccacaaaataccatttaaatggaagaaattcattggttaatcccggtgtcgccatggcaacccacaaggacgacgaggaacgcttcttcccttcgagcggagttctaatttttggcaaaactggagcagctaataaaactacattagaaaacgtgctcatgacaaatgaagaagaaattcgtcctaccaacccggtagctaccgaggaatacgggattgtaagcagcaacttgcaggcggctagcaccgcagcccagacacaagttgttaacaaccagggagccttacctggcatggtctggcagaaccgggacgtgtacctgcaaggtcccatttgggccaagattcctcacacggacggcaactttcacccgtctcctctaatgggtggctttggactgaaacacccgcctccccagatcctgatcaaaaacacaccggtacctgctaatcctccagaagtgtttactcctgccaagtttgcttccttcatcacgcagtacagcaccgggcaagtcagcgttgagatcgaatgggagctgcagaaagagaacagcaagcgctggaacccagagattcagtacacctccaactttgacaaacagactggagtggactttgctgttgacagccagggtgtttactctgagcct

SEQ ID NO: 4740 - protein, 644 aa, Adeno-associated virus
KAYDQQLKAGDNPYLRYNHADAEFQERLQEDTSFGGNLGRAVFQAKKRVLEPLGLVETPAKTAPGKKRPVDSPDSTSGIGKKGQQPAKKRLNFGQTGDSEPVPDPQPIGEPPAGPSGLGSGTMAAGGGAPMADNNEGADGVGNASGNWHCDSTRLGDRVITTSTRTWALPTYNNHLYKQISSQSAGSTNDNVYFGYSTPWGYFDFNRFHCHFSPRDWQRLINNNWGFRPKKLNFKLFNIQVKEVTTNDGVTTIANNLTSTVQVFSDSEYQLPYVLGSAHQGCLPPFPADVFMIPQYGYLTLNNGSQSVGRSSFYCLEYFPSQMLRTGNNFTFSYTFEDVPFHSSYAHSQSLGRLMNPLIDQYLYYLARTQSNAGGTAGNRELQFYQGGPTTMAEQAKNWLPGPCFRQQRVSKTLDQNNNSNFAWTGATKYHLNGRNSLVNPGVAMATHKDDEERFFPSSGVLIFGKTGAANKTTLENVLMTNEEEIRPTNPVATEEYGIVSSNLQAASTAAQTQVVNNQGALPGMVWQNRDVYLQGPIWAKIPHTDGNFHPSPLMGGFGLKHPPPQILIKNTPVPANPPEVFTPAKFASFITQYSTGQVSVEIEWELQKENSKRWNPEIQYTSNFDKQTGVDFAVDSQGVYSEP

SEQ ID NO: 4741 - DNA, 1933 bp, Adeno-associated virus; identical to SEQ ID NO: 4739

SEQ ID NO: 4742 - protein, 644 aa, Adeno-associated virus; identical to SEQ ID NO: 4740

SEQ ID NO: 4743 - DNA, 1933 bp, Adeno-associated virus
caaggcctacgaccagcagctcaaagcgggtgacaatccgtacctgcggtataaccacgccgacgccgagtttcaggagcgtcttcaagaagatacgtcttttgggggcaacctcgggcgagcagtcttccaggccaaaaagcgggttctcgaacctcttggtctggttgagacgccagctaagacggcacctggaaagaagcgaccggtagactcgccagactccacctcgggcatcggcaagaaaggccagcagcccgcgaaaaagagactcaactttgggcagactggcgactcagagtcagtccccgaccctcaaccaatcggagaaccaccagcaggcccctctggtctgggatctggtacaatggctgcaggcggtggcgcaccaatggctgacaatagcgagggcgccgacggagtgggtaatgcctcaggaaattggcattgcgattccacatggctgggcgacagagtcatcaccaccagcacccgaacctgggccctgcccacctacaacaaccacctctacaagcaaatctccagtcagtcagcagggagcaccaacgataacgtctatttcggctacagcaccccctgggggtattttgacttcaacagattccattgccacttctcaccacgtgactggcagcgacttatcaacaacaactggggattccggcccaagaagctcaacttcaagctcttcaacatccaggtcaaggaggtcacgacgaatgacggtgtcacaaccatcgctaataaccttaccagcacggttcaggtcttttcggactcggaatatcaactgccgtacgtcctcggctccgcgcaccagggctgcctgcctccgttcccggcagacgtgttcatgattccgcagtacggatacctgactctgaacaatggcagccaatcggtaggccgttcctccttctactgcctggagtactttccttctcagatgctgagaacgggcaacaacttcacctttagctacaccttcgaggacgtgcctttccacagcagctacgcgcacagccagagtctggaccggctgatgaatcccctcatcgaccagtacctgtactacttggccagaacacagagcaacgcaggaggtactgctggcaatcgggaactgcagttttatcagggcggacctaccaccatggccgaacaagcaaagaactggctgcccggaccttgcttccggcaacagagagtatccaagacgctggatcaaaataacaacagcaactttgcctggactggtgccacaaaataccatttaaatggaagaaattcattggttaatcccggtgtcgccatggcaacccacaaggacgacgaggaacgcttcttcccttcgagcggagttctaatttttggcaaaactggagcagctaataaaactacattagaaaacgtgctcatgacaaatgaagaagaaattcgtcctaccaacccggtagctaccgaggaatacgggattgtaagcagcaacttgcaggcggctagcaccgcagcccagacacaagttgttaacaaccagggagccttacctggcatggtctggcagaaccgggacgtgtacctgcaaggtcccatttgggccaagattcctcacacggacggcaactttcacccgtctcctctaatgggtggctttggactgaaacacccgcctccccagatcctgatcaaaaacacaccggtacctgctaatcctccagaagtgtttactcctgccaagcttgcttccttcatcacgcagtacagcaccgggcaagtcagcgttgagatcgagtgggagctgcagaaagagaacagcaagcgctggaacccagagattcagtacacctccaactttgacaaacagactggagtggactttgctgttgacagccagggtgtttactctgagcct

SEQ ID NO: 4744 - protein, 644 aa, Adeno-associated virus
KAYDQQLKAGDNPYLRYNHADAEFQERLQEDTSFGGNLGRAVFQAKKRVLEPLGLVETPAKTAPGKKRPVDSPDSTSGIGKKGQQPAKKRLNFGQTGDSESVPDPQPIGEPPAGPSGLGSGTMAAGGGAPMADNSEGADGVGNASGNWHCDSTWLGDRVITTSTRTWALPTYNNHLYKQISSQSAGSTNDNVYFGYSTPWGYFDFNRFHCHFSPRDWQRLINNNWGFRPKKLNFKLFNIQVKEVTTNDGVTTIANNLTSTVQVFSDSEYQLPYVLGSAHQGCLPPFPADVFMIPQYGYLTLNNGSQSVGRSSFYCLEYFPSQMLRTGNNFTFSYTFEDVPFHSSYAHSQSLDRLMNPLIDQYLYYLARTQSNAGGTAGNRELQFYQGGPTTMAEQAKNWLPGPCFRQQRVSKTLDQNNNSNFAWTGATKYHLNGRNSLVNPGVAMATHKDDEERFFPSSGVLIFGKTGAANKTTLENVLMTNEEEIRPTNPVATEEYGIVSSNLQAASTAAQTQVVNNQGALPGMVWQNRDVYLQGPIWAKIPHTDGNFHPSPLMGGFGLKHPPPQILIKNTPVPANPPEVFTPAKLASFITQYSTGQVSVEIEWELQKENSKRWNPEIQYTSNFDKQTGVDFAVDSQGVYSEP

SEQ ID NO: 4745 - DNA, 1933 bp, Adeno-associated virus
caaggcctacgaccagcagctcaaagcgggtgacaatccgtacctgcggtataaccacgccgacgccgagtttcaggagcgtcttcaagaagatacgtcttttgggggcaacctcgggcgagcagtcttccaggccaaaaagcgggttctcgaacctcttggtctggttgagacgccagctaagacggcacctggaaagaagcgaccggtagactcgccagactccacctcgggcatcggcaagaaaggccagcagcccgcgaaaaagagactcaactttgggcagactggcgactcagagtcagtccccgaccctcaaccaatcggagaaccaccagcaggcccctctggtctgggatctggtacaatggctgcaggcggtggcgcaccaatggctgacaataacgagggcgccgacggagtgggtaatgcctcaggaaattggcattgcgattccacatggctgggcgacagagtcatcaccaccagcacccgaacctgggccctgcccacctacaacaaccacctctacaagcaaatctccagtcagtcagcagggagcaccaacgataacgtctatttcggctacagcaccccctgggggtattttgacttcaacagattccattgccacttctcaccacgtgactggcagcgacttatcaacaacaactggggattccggcccaagaagctcaacttcaagctcttcaacatccaggtcaaggaggtcacgacgaatgacggcgtcacaaccatcgctaataaccttaccagcacggttcaggtcttttcggacccggaatatcaactgccgtacgtcctcggctccgcgcaccagggctgcctgcctccgttcccggcagacgtgttcatgattccgcagtacggatacctgactctgaacaatggcagccaatcggtaggccgttcctccttctactgcctggagtactttccttctcagatgctgagaacgggcaacaacttcacctttagctacaccttcgaggacgtgcctttccacagcagctacgcgcacagccagagtctggaccggctgatgaatcccctcatcgaccagtacctgtactacttggccagaacacagagcaacgcaggaggtactgctggcaatcgggaactgcagttttatcagggcggacctaccaccatggccgaacaagcaaagaactggctgcccggaccttgcttccggcaacagagagtatccaagacgctggatcaaaataacaacagcaactttgcctggactggtgccacaaaataccatttaaatggaagaaattcattggttaatcccggtgtcgccatggcaacccacaaggacgacgaggaacgcttcttcccttcgagcggagttctaatttttggcaaaactggagcagctaataaaactacattagaaaacgtgctcatgacaaatgaagaagaaattcgtcctaccaacccggtagctaccgaggaatacgggattgtaagcagcaacttgcaggcggctagcaccgcagcccagacacaagttgttaacaaccagggagccttacctggcatggtctggcagaaccgggacgtgtacctgcaaggtcccatttgggccaagattcctcacacggacggcaactttcacccgtctcctctaatgggtggctttggactgaaacacccgcctccccagatcctgatcaaaaacacaccggtacctgctaatcctccagaagtgtttactcctgccaagattgcttccttcatcacgcagtacagcaccgggcaagtcagcgttgagatcgagtgggagctgcagaaagagaacagcaagcgctggaacccagagattcagtacacctccaactttgacaaacagactggagtggactttgctgttgacagccagggtgtttactctgagcct

SEQ ID NO: 4746 - protein, 644 aa, Adeno-associated virus
KAYDQQLKAGDNPYLRYNHADAEFQERLQEDTSFGGNLGRAVFQAKKRVLEPLGLVETPAKTAPGKKRPVDSPDSTSGIGKKGQQPAKKRLNFGQTGDSESVPDPQPIGEPPAGPSGLGSGTMAAGGGAPMADNNEGADGVGNASGNWHCDSTWLGDRVITTSTRTWALPTYNNHLYKQISSQSAGSTNDNVYFGYSTPWGYFDFNRFHCHFSPRDWQRLINNNWGFRPKKLNFKLFNIQVKEVTTNDGVTTIANNLTSTVQVFSDPEYQLPYVLGSAHQGCLPPFPADVFMIPQYGYLTLNNGSQSVGRSSFYCLEYFPSQMLRTGNNFTFSYTFEDVPFHSSYAHSQSLDRLMNPLIDQYLYYLARTQSNAGGTAGNRELQFYQGGPTTMAEQAKNWLPGPCFRQQRVSKTLDQNNNSNFAWTGATKYHLNGRNSLVNPGVAMATHKDDEERFFPSSGVLIFGKTGAANKTTLENVLMTNEEEIRPTNPVATEEYGIVSSNLQAASTAAQTQVVNNQGALPGMVWQNRDVYLQGPIWAKIPHTDGNFHPSPLMGGFGLKHPPPQILIKNTPVPANPPEVFTPAKIASFITQYSTGQVSVEIEWELQKENSKRWNPEIQYTSNFDKQTGVDFAVDSQGVYSEP

SEQ ID NO: 4747 - protein, 728 aa, Adeno-associated virus
MAADGYLPDWLEDNLSEGIREWWDLKPGAPKPKANQQKQDDGRGLVLPGYKYLRPFNGLDKGEPVNEADAAALEHDKAYDKQLEQGDNPYLKYNHADAEFQERLQEDTSFGGNLGRAVFQAKKRVLEPLGLVEEVAKTAPGKKRPIESPDSSTGIGKKGQQPAKKKLNFGQTGDSESVPDPQPLGEPPAAPSGLGSGTMAAGGGAPMADNNEGADGVGNASGNWHCDSTWLGDRVITTSTRTWALPTYNNHLYKQISSQSGATNDNHFFSYSTPWGYFDFNRFHCHFSPRDWQRLINNNWGFRPRKLRFKLFNIQVKEVTTNDGVTTIANNLTSTIQVFSDSEYQLPYVLGSAHQGCLPPFPADVFMIPQYGYLTLNNGSQSVGRSSFYCLEYFPSQMLRTGNNFEFSYTFEEVPFHSSYVHSQSLDRLMNPLIDQYLYYLARTQSTTGSTRELQFHQAGPNTMAEQSKNWLPGPCYRQQRLSKNIDSNNNSNFAWTGATKYHLNGRNSLTNPGVAMATNKDDEDQFFPINGVLVFGKTGAANKTTLENVLMTSEEEIKTTNPVATEEYGVVSSNLQSSTAGPQTQTVNSQGALPGMVWQNRDVCLQGPIWAKIPHTDGNFHPSPLMGGFGLKHPPPQILIKNTPVPANPPEVFTPAKFASFITQYSTGQVSVEIEWELQKENSKRWNPEIQYTSNYAKSNNVEFAVNNEGVYTEPRPIGTRYLTRNL

SEQ ID NO: 4748 - protein, 728 aa, Adeno-associated virus
MAADGYLPDWLEDNLSEGIREWWDLKPGAPKPKANQQKQDDGRGLVLPGYKYLGPFNGLDKGEPVNEADAAALEHDKAYDKQLEQGDNPYLKYNHADAEFQERLQEDTSFGGNLGRAVFQAKKRVLEPLGLVEEGAKTASGKKRPIESPDSSTGIGKKGQQPAKKKLNFGQTGDSESVPDPQPLGEPPAAPSGLGSGTMAAGGGAPMADNNEGADGVGNASGNWHCDSTWLGDRVITTSTRTWALPTYNNHLYKQISSQSGATNDNHFFGYSTPWGYFDFNRFHCHFSPRDWQRLINNNWGFRPRKLRFKLFNIQVKEVTTNDGVTTIANNLTSTIQVFSDSEYQLPYVLGSAHQGCLPPFPADVFMIPQYGYLTLNNGSQSVGRSSFCCLEYFPSQMLRTGNNFEFSYTFEEVPFHSSYAHSQSLDRLMNPLIDQYLYYLARTQSTTGSTRELQFHQAGPNTVAEQSKNWLPGPCYRQQRLSKNIDSNNNSNFAWTGATKYHLNGRNSLTNPGVAMATNKDDEDQFLPINGVLVFGKTGAANKTTLENVLMTSEEEIKTTNPVATEEYGVVSSNLQSSTAGPRTQTVNSQGALPGMVWQNRDVYLQGPIWAEIPHTDGNFHPSPLMGGFGLKHPPPQILIKNTPVPANPPEVFTPAKFASFITQYSTGQVSVEIEWELQKENSKRWNPEIQYTSNYAKSNNVEFAVNNEGVYTEPRPIGTRYLTRNL

SEQ ID NO: 4749 - protein, 738 aa, Adeno-associated virus
MAADGYLPDWLEDNLSEGIREWWALKPGAPKPKANQQKQDDGRGLVLPGYKYLGPFNGLDKGEPVNAADAAALEHDKAYDQQLKAGDNPYLRYNHADAEFQERLQEDTSFGGNLGRAVFQAKKRVLEPLGLVEEGAKTAPGKKRPVEPSPQRSPDSTTGIGKKGQQPAKKRLNFGQTGDSESVPDPQPIGEPPAGPSGLGSGTMAAGGGAPMADNNEGADGVGSSSGNWHCDSTWLGDRVITTSTRTWALPTYNNHLYKQISNGTSGGSTNDNTYFGYSTPWGYFDFNRFHCHFSPRDWQRLINNNWGFRPKRLNFKLFNIQVKEVTQNEGTKTIANNLTSTIQVFTDSEYQLPYVLGSARQGCLPPFPADVFMIPQYGYLTLNNGSQAVGRSSFYCLEYFPSQMLRTGNNFEFSYQFEDVPFHSSYAHSQSLDRLMNPLIDQYLYYLSRTQSTGGTAGTQQLLFSQAGPNNMSAQAKNWLPGPCYRQQRVSTTLSQNNNSNFAWTGATKYHLNGRDSLVNPGVAMATHKDDEERFFPSSGVLMFGKQGAGKGNVDYSSVMLTSEEEIKTTNPVATEQYGVVADNLQQQNAAPIVGAVNSQGALPGMVWQNRDVYLQGPIWAKIPHTDGNFHPSPLMGGFGLKHPPPQILIKNTPVPADPPTTFSQAKLASFITQYSTGQVSVEIEWELQKENSKRWNPEIQYTSNYYKSTNVDFAVNTDGTYSEPRPIGTRYLTRNL

SEQ ID NO: 4750 - DNA, 3121 bp, Adeno-associated virus
gaattcgcccttcgcagagaccaaagttcaactgaaacgaatcaaccggtttattgattaacaagcaattacagattacgggtgaggtaacgggtgccgatggggcgaggctcagaataagtgccatctgtgttaacagcaaagtccacatttgtagatttgtagtagttggaagtgtattgaatctctgggttccagcgtttgctgttttctttctgcagctcccattcaatttccacgctgacctgtccggtgctgtactgcgtgatgaacgacgccagcttagcttgactgaaggtagttggaggatccgcgggaacaggtgtattcttaatcaggatctgaggaggcgggtgtttcagtccaaagccccccatcagcggcgagggatgaaagtttccgtccgtgtgaggaatcttggcccagataggaccctgcaggtacacgtcccggttctgccagaccatgccaggtaaggctccttgactgttgacggcccctacaataggagcggcgttttgctgttgcaggttatcggccaccacgccgtactgttctgtggccactgggttggtggttttaatttcttcctcactggttagcataacgctgctatagtccacgttgccttttccagctccctgtttcccaaacattaagactccgctggacggaaaaaatcgctcttcgtcgtccttgtgggttgccatagcgacaccgggatttaccagagagtctctgccattcagatgatacttggtggcaccggtccaggcaaagttgctgttgttattttgcgacagtgtcgtggagacgcgttgctgccggtagcagggcccgggtagccagtttttggcctgagccgacatgttattaggcccggcctgagaaaatagcaactgctgagttcctgcggtacctcccgtggactgagtccgagacaggtagtacaggtactggtcgatgagggggttcatcagccggtccaggctttggctgtgcgcgtagctgctgtgaaaaggcacgtcctcaaactggtagctgaactcaaagttgttgcccgttctcagcatttgagaaggaaagtactccaggcagtagaaggaggaacggcccacggcctgactgccattgttcagagtcaggtacccgtactgaggaatcatgaagacgtccgccgggaacggaggcaggcagccctggcgcgcagagccgaggacgtacgggagctggtattccgagtccgtaaagacctgaatcgtgctggtaaggttattggcgatggtcttggtgccttcattctgcgtgacctccttgacctggatgttgaagagcttgaagttgagtctcttgggccggaatccccagttgttgttgatgagtcgctgccagtcacgtggtgagaagtggcagtggaatctgttaaagtcaaaatacccccagggggtgctgtagccgaagtaggtgttgtcgttggtgcttcctcccgaagtcccgttggagatttgcttgtagaggtggttgttgtaggtggggagggcccaggttcgggtgctggtggtgatgactctgtcgcccagccatgtggaatcgcaatgccaatttcctgaggaactacccactccgtcggcgccttcgttattgtctgccattggagcgccaccgcctgcagccattgtaccagatcccagaccagaggggcctgcggggggttctccgattggttgagggtcgggcactgactctgagtcgccagtctgcccaaagttgagtctctttttcgcgggctgctggcctttcttgccgatgcccgtagtggagtctggagaacgctggggtgatggctctaccggtctcttctttccaggagccgtcttagcgccttcctcaaccagaccgagaggttcgagaacccgcttcttggcctggaagactgctcgtccgaggttgcccccaaaagacgtatcttcttgcagacgctcctgaaactcggcgtcggcgtggttataccgcaggtacggattgtcacccgctttgagctgctggtcgtaggccttgtcgtgctcgagggccgctgcgtccgccgcgttgacgggctcccccttgtcgagtccgttgaagggtccgaggtacttgtagccaggaagcaccagaccccggccgtcgtcctgcttttgctggttggctttgggcttcggggctccaggtttcagcgcccaccactcgcgaatgccctcagagaggttgtcctcgagccaatctggaagataaccatcggcagccatacctgatctaaatcatttattgttcaaagatgcagtcatccaaatccacattgaccagatcgcaggcagtgcaagcgtctggcacctttcccatgatatgatgaatgtagcacagtttctgatacgcctttttgacgacagaaacgggttgagattctgacacgggaaagcactctaaacagtctttctgtccgtgagtgaagcagatatttgaattctgattcattctctcgcattgtctgcagggaaacagcatcagattcatgcccacgtgacgagaacatttgttttggtacctgtccgcgtagttgatcgaagcttccgcgtctgacgtcgatggctgcgcaactgactcgcgcacccgtttgggctcacttatatctgcgtcactgggggcgggtcttttcttggctccaccctttttgacgtagaattcatgctccacctcaaccacgtgatcctttgcccaccggaaaaagtctttgacttcctgcttggtgaccttcccaaagtcatgatccagacggcgggtgagttcaaatttgaacatccggtcttgcaacggctgctggtgttcgaaggtcgttgagttcccgtcaatcacggcgcacatgttggtgttggaggtgacgatcacgggagtcgggtctatctgggccgaggacttgcatttctggtccacgcgcaccttgcttcctccgagaatggctttggccgactccacgaccttggcggtcatcttcccctcctcccaccagatcaccatcttgtcgacacagtcgttgaagggaaagttctcattggtccagttgacgcagccgtagaagggcgaattc

SEQ ID NO: 4751 - DNA, 3121 bp, Adeno-associated virus
gaattcgcccttctacggctgcgtcaactggaccaatgagaactttcccttcaacgactgtgtcgacaagatggtgatctggtgggaggaggggaagatgaccgccaaggtcgtggagtcggccaaagccattctcggaggaagcaaggtgcgcgtggaccagaaatgcaagtcctcggcccagatagacccgactcccgtgatcgtcacctccaacaccaacatgtgcgccgtgattgacgggaactcaacgaccttcgaacaccagcagccgttgcaagaccggatgttcaaatttgaactcacccgccgtctggatcatgactttgggaaggtcaccaagcaggaagtcaaagactttttccggtgggcaaaggatcacgtggttgaggtggagcacgaattctacgtcaaaaagggtggagccaagaaaagacccgcccccagtgacgcagatataagtgagcccaaacgggtgcgcgagtcagttgcgcagccatcgacgtcagacgcggaagcttcgatcaactacgcagacaggtaccaaaacaaatgttctcgtcacgcgggcatgaatctgatgctgtttccctgcagacaatgcgagagaatgaatcagaattcaaatatctgcttcactcacggacagaaagactgtttagagtgctttcccgtgtcagaatctcaacccgtttctgtcgtcaaaaaggcgtatcagaaactgtgctacattcatcatatcatgggaaaggtgccagacgcttgcactgcctgcgatctggtcgatgtggatttggatgactgcatctttgaacaataaatgatttaaatcaggtatggctgccgatggttatcttccagattggctcgaggacaacctctctgagggcattcgcgagtggtgggcgctgaaacctggagccccgaagcccaaagccaaccagcaaaagcaggacggcggccggggtctggtgcttcctggctacaagtacctcggacccttcaacggactcgacaagggggagcccgtcaacgcggcggacgcagcggccctcgagcacgacaaggcctacgaccagcagctcaaagcgggtgacaatccgtacctgcggtataaccacgccgacgccgagtttcaggagcgtctgcaagaagatacgtcttttgggggcaacctcgggcgagcagtcttccaggccaagaagcgggttctcgaacctctcggtctggttgaggaaggcgctaagacggctcctggaaagaagagaccggtagagccatcaccccagcgttctccagactcctctacgggcatcggcaagaaaggccagcagcccgcgaaaaagagactcaactttgggcagactggcgactcagagtcagtgcccgaccctcaaccaatcggagaaccccccgcaggcccctctggtctgggatctggtacaatggctgcaggcggtggcgctccaatggcagacaataacgaaggcgccgacggagtgggtagttcctcaggaaattggcattgcgattccacatggctgggcgactgagtcatcaccaccagcacccgaacctgggccctccccacctacaacaaccacctctacaagcaaatctccaacgggacttcgggaggaagcaccaacgacaacacctacttcggctacagcaccccctgggggtattttgactttaacagattccactgccacttctcaccacgtgactggcagcgactcatcaacaacaactggggattccggcccaagagactcaacttcaagctcttcaacatccaggtcaaggaggtcacgcagaatgaaggcaccaagaccatcgccaataaccttaccagcacgattcaggtctttacggactcggaataccagctcccgtacgtcctcggctctgcgcaccagggctgcctgcctccgttcccggcggacgtcttcatgattcctcagtacgggtacctgactctgaacaatggcagtcaggccgtgggccgttcctccttctactgcctggagtactttccttctcaaatgctgagaacgggcaacaactttgagttcagctaccagtttgaggacgtgccttttcacagcagctacgcgcacagccaaagcctggaccggctgatgaaccccctcatcgaccagtacctgtactacctgtctcggactcagtccacgggaggtaccgcaggaactcagcagttgctattttctcaggccgggcctaataacatgtcggctcaggccaaaaactggctacccgggccctgctaccggcagtaacgcgtctccacgacactgtcgcaaaataacaacagcaactttgtctggaccggtgccaccaagtatcatctgaatggcagagactctctggtagatcccggtgtcgctatggcaacccacaaggacgacgaagagcgattttttccgtccagcggagtcataatgtttgggaaacagggagctggaaaagacaacgtggactatagcagcgtcatgctaaccagtgaggaagaaattaaaaccaccaacccagtggccacagaacagtacggcgtggtggccgataacctgcaacagcaaaacgccgctcctattgtaggggccgtcaacagtcaaggagccttacctggcatggtctggcagaaccgggacgtgtacctgcagggtcctacctgggccaagattcctcacacggacggaaactttcatccctcgccgctgatgggaggctttggactgaaacacccgcctcctcagatcctgattaagaatacacctgttcccgcggatcctccaactaccttcagtcaagctaagctggcgtcgttcatcacgcagtacagcaccggacaggtcagcgtggaaattgaatgggagctgcaggaagaaaacagcaaacgctggaacccagagattcaatacacttccaactactacaaatctacaaatgtggactttgctgttaacacagatggcacttattctgagcctcgccccatcggcacccgttacctcacccgtaatctgtaattgcttgttaatcaataaaccggttgattcgtttcagttgaactttggtctctgcgaagggcgaattc

SEQ ID NO: 4752 - protein, 738 aa, Adeno-associated virus
MAADGYLPDWLEDNLSEGIREWWALKPGAPKPKANQQKQDDGRGLVLPGYKYLGPFNGLDKGEPVNAADAAALEHDKAYDQQLKAGDNPYLRYNHADAEFQERLQEDTSFGGNLGRAVFQAKKRVLEPLGLVEEGAKTAPGKKRPVEPSPQRSPDSSTGIGKKGQQPAKKRLNFGQTGDSESVPDPQPIGEPPAGPSGLGSGTMAAGGGAPMADNNEGADGVGSSSGNWHCDSTWLGDGVITTSTRTWALPTYNNHLYKQISNGTSGGSTNDNTYFGYSTPWGYFDFNRFHCHFSPRDWQRLINNNWGFRPKSLNFKLFNIQVKEVTQNEGTKTIANNLTSTIQVFTDSEYQLPYVLGSAHQGCLPPFPADVFMIPQYGYLTLNNGSQAVGRSSFYCLEYFPSQMLRTGNNFEFSYQFEDVPFHSSYAHSQSLDRLMNPLIDQYLYYLSRTQSTGGTAGTQQLLFSQAGPNNMSAQAKNWLPGPCYRQQRVSTTLSQNDNSNFAWTGATKYHLNGRDSLVNPGVAMATHKDDEERFFPSSGVLMFGKQGAGKDNVDYSSVMLTSEEEIKTTNPVATEQYGVVADNLQQQNAAPIVGAVNSQGALPGMVWQNRDVYLQGPIWAKIPHTDGNFHPSPLMGGFGLKHPPPQILIKNTPVPADPPTTFSQAKLASFITQYSTGQVSVEIEWELQKENSKRWNPEIQYTSNYYKSTNVDFAVNTDGTYSEPRPIGTRYLTRNL

SEQ ID NO: 4753 - DNA, 3121 bp, Adeno-associated virus
gaattcgcccttcgcgagaccaaagttcaactgaaacgaatcaaccggtttattgattaacaagcaattacagattacgggtgaggtaacgggtgccgatggggcgaggctcagaataagtgccatctgtgttaacagcaaagtccacatttgtagatttgtagtagttggaagtgtattgaatctctgggttccagcgtttgctgttttctttctgcagctcccattcaatttccacgctgacctgtccggtgctgtactgcgtgatgaacgacgccagcttagcttgactgaaggtagttggaggatccgcgggaacaggtgtattcttaatcaggatctgaggaggcgggtgtttcagtccaaagcctcccatcagcggcgagggatgaaagtttccgtccgtgtgaggaatcttggcccagataggaccctgcaggtacacgtcccggttctgccagaccatgccaggtaaggctccttgactgttgacggcccctacaataggagcggcgttttgctgttgcaggttatcggccaccacgccgtactgttctgtggccactgggttggtggttttaatttcttcctcactggttagcataacgctgctatagtccacgttgtcttttccagctccctgtttcccaaacattaagactccgctggacggaaaaaatcgctcttcgtcgtccttgtgggttgccatagcgacaccgggatttaccagagagtctctgccattcagatgatacttggtggcaccggtccaggcaaagttgctgttgtcattttgcgacagtgtcgtggagacgcgttgctgccggtagcagggcccgggtagccagtttttggcctgagccgacatgttattaggcccggcctgagaaaatagcaactgctgagttcctgcggtacctcccgtggactgagtccgagacaggtagtacaggtactggtcgatgagggggttcatcagccggtccaggctttggctgtgcgcgtagctgctgtgaaaaggcacgtcctcaaactggtagctgaactcaaagttgttgcccgttctcagcatttgagaaggaaagtactccaggcagtagaaggaggaacggcccacggcctgactgccattgttcagagtcaggtacccgtactgaggaatcatgaagacgtccgccgggaacggaggcaggcagccctggtgcgcagagccgaggacgtacgggagctggtattccgagtccgtaaagacctgaatcgtgctggtaaggttattggcgatggtcttggtgccttcattctgcgtgacctccttgacctggatgttgaagagcttgaagttgaggctcttgggccggaatccccagttgttgttgatgagtcgctgccagtcacgtggtgagaagtggcagtggaatctgttaaagtcaaaatacccccagggggtgctgtagccgaagtaggtgttgtcgttggtgcttcctcccgaagtcccgttggagatttgcttgtagaggtggttgttgtaggtggggagggcccaggttcgggtgctggtggtgatgactccgtcgcccagccatgtggaatcgcaatgccaatttcctgaggaactacccactccgtcggcgccttcgttattgtctgccattggagcgccaccgcctgcagccattgtaccagatcccagaccagaggggcctgcggggggttctccgattggttgagggtcgggcactgactctgagtcgccagtctgcccaaagttgagtctctttttcgcgggctgctggcctttcttgccgatgcccgtagaggagtctggagaacgctggggtgatggctctaccggtctcttctttccaggagccgtcttagcgccttcctcaaccagaccgagaggttcgagaacccgcttcttggcctggaagactgctcgcccgaggttgcccccaaaagacgtatcttcttgcagacgctcctgaaactcggcgtcggcgtggttataccgcaggtacggattgtcacccgctttgagctgctggtcgtaggccttgtcgtgctcgagggccgctgcgtccgccgcgttgacgggctcccccttgtcgagtccgttgaagggtccgaggtacttgtagccaggaagcaccagaccccggccgtcgtcctgcttttgctggttggctttgggcttcggggctccaggtttcagcgcccaccactcgcgaatgccctcagagaggttgtcctcgagccaatctggaagataaccatcggcagccatacctgatttaaatcatttattgttcaaagatgcagtcatccaaatccacattgaccagatcgcaggcagtgcaagcgtctggcacctttcccatgatatgatgaatgtagcacagtttctgatacgcctttttgacgacagaaacgggttgagattctgacacgggaaagcactctaaacagtctttctgtccgtgagtgaagcagatatttgaattctgattcattctctcgcattgtctgcagggaaacagcatcagattcatgcccacgtgacgagaacatttgttttggtacctgtctgcgtagttgatcgaagcttccgcgtctgacgtcgatggctgcgcaactgactcgcgcacccgtttgggctcacttatatctgcgtcactgggggcgggtcttttcttggctccaccctttttgacgtagaattcatgctccacctcaaccacgtgatcctttgcccaccggaaaaagtctttgacttcctgcttggtgaccttcccaaagtcatgatccagacggcgggtgagttcaaatttgaacatccggtcttgcaacggctgctggtgttcgaaggtcgttgagttcccgtcaatcacggcgcacatgttggtgttggaggtgacgatcacgggagtcgggtctatctgggccgaggacttgcatttctggtccacgcgcaccttgcttcctccgagaatggctttggccgactccacgaccttggcggtcatcttcccctcctcccaccagatcaccatcttgtcgacacagtcgttgaagggaaagttctcattggtccagttgacgcagccgtagaaagggcgaattc

SEQ ID NO: 4754 - DNA, 2211 bp, Adeno-associated virus
atggctgctgacggttatcttccagattggctcgaggacaacctttctgaaggcattcgtgagtggtgggctctgaaacctggagtccctcaacccaaagcgaaccaacaacaccaggacaaccgtcggggtcttgtgcttccgggttacaaatacctcggacccggtaacggactcgacaaaggagagccggtcaacgaggcggacgcggcagccctcgaacacgacaaagcttacgaccagcagctcaaggccggtgacaacccgtacctcaagtacaaccacgccgacgccgagtttcaggagcgtcttcaagaagatacgtcttttgggggcaaccttggcagagcagtcttccaggccaaaaagaggatccttgagcctcttggtctggttgaggaagcagctaaaacggctcctggaaagaagggggctgtagatcagtctcctcaggaaccggactcatcatctggtgttggcaaatcgggcaaacagcctgccagaaaaagactaaatttcggtcagactggagactcagagtcagtcccagaccctcaacctctcggagaaccaccagcagcccccacaagtttgggatctaatacaatggcttcaggcggtggcgcaccaatggcagacaataacgagggtgccgatggagtgggtaattcctcaggaaattggcattgcgattcccaatggctgggcgacagagtcatcaccaccagcaccagaacctgggccctgcccacttacaacaaccatctctacaagcaaatctccagccaatcaggagcttcaaacgacaaccactactttggctacagcaccccttgggggtattttgactttaacagattccactgccacttctcaccacgtgactggcagcgactcattaacaacaactggggattccggcccaagaaactcagcttcaagctcttcaacatccaagttagaggggtcacgcagaacgatggcacgacgactattgccaataaccttaccagcacggttcaagtgtttacggactcggagtatcagctcccgtacgtgctcgggtcggcgcaccaaggctgtctcccgccgtttccagcggacgtcttcatggtccctcagtatggatacctcaccctgaacaacggaagtcaagcggtgggacgctcatccttttactgcctggagtacttcccttcgcagatgctaaggactggaaataacttccaattcagctataccttcgaggatgtaccttttcacagcagctacgctcacagccagagtttggatcgcttgatgaatcctcttattgatcagtatctgtactacctgaacagaacgcaaggaacaacctctggaacaaccaaccaatcacggctgctttttagccaggctgggcctcagtctatgtctttgcaggccagaaattggctacctgggccctgctaccggcaacagagactttcaaagactgctaacgacaacaacaacagtaactttccttggacagcggccagcaaatatcatctcaatggccgcgactcgctggtgaatccaggaccagctatggccagtcacaaggacgatgaagaaaaatttttccctatgcacggcaatctaatatttggcaaagaagggacaacggcaagtaacgcagaattagataatgtaatgattacggatgaagaagagattcgtaccaccaatcctgtggcaacagagcagtatggaactgtggcaaataacttgcagagctcaaatacagctcccacgactggaactgtcaatcatcagggggccttacctggcatggtgtggcaagatcgtgacgtgtaccttcaaggacctatctgggcaaagattcctcacacggatggacactttcatccttctcctctgatgggaggctttggactgaaacatccgcctcctcaaatcatgatcaaaaatactccggtaccggcaaatcctccgacgactttcagcccggccaagtttgcttcatttatcactcagtactccactggacaggtcagcgtggaaattgagtgggagctacagaaagaaaacagcaaacgttggaatccagagattcagtacacttccaactacaacaagtctgttaatgtggactttactgtagacactaatggtgtttatagtgaacctcgccctattggaacccggtatctcacacgaaacttgtga

SEQ ID NO: 4755 - protein, 737 aa, Adeno-associated virus
MAADGYLPDWLEDNLSEGIREWWDLKPGAPKPKANQQKQDNGRGLVLPGYKYLGPFNGLDKGEPVNAADAAALEHDKAYDQQLNAGDNPYLRYNHADAEFQERLQEDTSFGGNLGRAVFQAKKRVLEPLGLVEEGAKTAPAKKRPVEPSPQRSPDSSTGIGKKGQQPARKRLNFGQTGDSESVPDPQPLGEPPAAPSSVGSGTVAAGGGAPMADNNEGADGVGNASGNWHCDSTWLGDRVITTSTRTWALPTYNNHLYEQISSETAGSTNDNTYFGYSTPWGYFDFNRFHCHFSPRDWQRLINNNWGFRPKKLRFKLFNIQVKEVTTNDGVTTIANNLTSTIQVFSDSEYQLPYVLGSAHQGCLPPFPADVFMIPQYGYLTLNNGSQSVGRSSFYCLEYFPSQMLRTGNNFEFSYSFEDVPFHSSYAHSQSLDRLMNPLIDQYLYYLARTQSDPGGTAGNRELQFYQGGPSTMAEQAKNWLPGPCFRQQRVSKTLDQNNNSNFAWTGATKYHLNGRNSLVNPGVAMATHKDDEDRFFPSSGVLIFGKTGATNKTTLENVLMTNEEEIRPTNPVATEEYGIVSSNLQAANTAAQTQVVNNQGALPGMVWQNRDVYLQGPIWAKIPHTDGNFHPSPLMGGFGLKHPPPQILIKNTPVPANPPEVFTPAKFASFITQYSTGQVSVEIEWELQKENSKRWDPEIQYTSNFEKQTGVDFAVDSQGVYSEPRPIGTRYLTRNL

SEQ ID NO: 4756 - DNA, 2211 bp, Adeno-associated virus
atggctgctgacggttatcttccagattggctcgaggacaacctttctgaaggcattcgtgagtggtgggctctgaaacctggagtccctcaacccaaagcgaaccaacaacaccaggacaaccgtcggggtcttgtgcttccgggttacaaatacctcggacccggtaacggactcgacaaaggagagccggtcaacgaggcggacgcggcagccctcgaacacgacaaagcttacgaccagcagctcaaggccggtgacaacccgtacctcaagtacaaccacgccgacgccgagtttcaggagcgtcttcaagaagatacgtcttttgggggcaaccttggcagagcagtcttccaggccaaaaagaggatccttgagcctcttggtctggttgaggaagcagctaaaacggctcctggaaagaagggggctgtagatcagtctcctcaggaaccggactcatcatctggtgttggcaaatcgggcaaacagcctgccagaaaaagactaaatttcggtcagactggagactcagagtcagtcccagaccctcaacctctcggagaaccaccagcagcccccacaagtttgggatctaatacaatggcttcaggcggtggcgcaccaatggcagacaataacgagggtgccgatggagtgggtaattcctcaggaaattggcattgcgattcccaatggctgggcgacagagtcatcaccaccagcaccagaacctgggccctgcccacttacaacaaccatctctacaagcaaatctccagccaatcaggagcttcaaacgacaaccactactttggctacagcaccccttgggggtattttgactttaacagattccactgccacttctcaccacgtgactggcagcgactcattaacaacaactggggattccggcccaagaaactcagcttcaagctcttcaacatccaagttagaggggtcacgcagaacgatggcacgacgactattgccaataaccttaccagcacggttcaagtgtttacggactcggagtatcagctcccgtacgtgctcgggtcggcgcaccaaggctgtctcccgccgtttccagcggacgtcttcatggtccctcagtatggatacctcaccctgaacaacggaagtcaagcggtgggacgctcatccttttactgcctggagtacttcccttcgcagatgctaaggactggaaataacttccaattcagctataccttcgaggatgtaccttttcacagcagctacgctcacagccagagtttggatcgcttgatgaatcctcttattgatcagtatctgtactacctgaacagaacgcaaggaacaacctctggaacaaccaaccaatcacggctgctttttagccaggctgggcctcagtctatgtctttgcaggccagaaattggctacctgggccctgctaccggcaacagagactttcaaagactgctaacgacaacaacaacagtaactttccttggacagcggccagcaaatatcatctcaatggccgcgactcgctggtgaatccaggaccagctatggccagtcacaaggacgatgaagaaaaatttttccctatgcacggcaatctaatatttggcaaagaagggacaacggcaagtaacgcagaattagataatgtaatgattacggatgaagaagagattcgtaccaccaatcctgtggcaacagagcagtatggaactgtggcaaataacttgcagagctcaaatacagctcccacgactggaactgtcaatcatcagggggccttacctggcatggtgtggcaagatcgtgacgtgtaccttcaaggacctatctgggcaaagattcctcacacggatggacactttcatccttctcctctgatgggaggctttggactgaaacatccgcctcctcaaatcatgatcaaaaatactccggtaccggcaaatcctccgacgactttcagcccggccaagtttgcttcatttatcactcagtactccactggacaggtcagcgtggaaattgagtgggagctacagaaagaaaacagcaaacgttggaatccagagattcagtacacttccaactacaacaagtctgttaatgtggactttactgtagacactaatggtgtttatagtgaacctcgccctattggaacccggtatctcacacgaaacttgtaa

SEQ ID NO: 4757 - protein, 736 aa, Adeno-associated virus
MAADGYLPDWLEDNLSEGIREWWALKPGVPQPKANQQHQDNRRGLVLPGYKYLGPGNGLDKGEPVNEADAAALEHDKAYDQQLKAGDNPYLKYNHADAEFQERLQEDTSFGGNLGRAVFQAKKRILEPLGLVEEAAKTAPGKKGAVDQSPQEPDSSSGVGKSGKQPARKRLNFGQTGDSESVPDPQPLGEPPAAPTSLGSNTMASGGGAPMADNNEGADGVGNSSGNWHCDSQWLGDRVITTSTRTWALPTYNNHLYKQISSQSGASNDNHYFGYSTPWGYFDFNRFHCHFSPRDWQRLINNNWGFRPKKLSFKLFNIQVRGVTQNDGTTTIANNLTSTVQVFTDSEYQLPYVLGSAHQGCLPPFPADVFMVPQYGYLTLNNGSQAVGRSSFYCLEYFPSQMLRTGNNFQFSYTFEDVPFHSSYAHSQSLDRLMNPLIDQYLYYLNRTQGTTSGTTNQSRLLFSQAGPQSMSLQARNWLPGPCYRQQRLSKTANDNNNSNFPWTAASKYHLNGRDSLVNPGPAMASHKDDEEKFFPMHGNLIFGKEGTTASNAELDNVMITDEEEIRTTNPVATEQYGTVANNLQSSNTAPTTGTVNHQGALPGMVWQDRDVYLQGPIWAKIPHTDGHFHPSPLMGGFGLKHPPPQIMIKNTPVPANPPTTFSPAKFASFITQYSTGQVSVEIEWELQKENSKRWNPEIQYTSNYNKSVNVDFTVDTNGVYSEPRPIGTRYLTRNL

SEQ ID NO: 4758 - protein, 728 aa, Adeno-associated virus
MAADGYLPDWLEDNLSEGIREWWDLKPGAPKPKANQQKQDDGRGLVLPGYKYLGPFNGLDKGEPVNEADAAALEHDKAYDKQLEQGDNPYLKYNHADAEFQERLQEDTSFGGNLGRAVFQAKKRVLEPLGLVEEGAKTAPGKKRPIESPDSSTGIGRKGQQPAKKKLNFGQTGDSESVPDPQPIGEPPAGPSGLGSGTMAAGGGAPMADNNEGADGVGNASGNWHCDSTWLGDRVITTSTRTWALPTYNNHLYKQISSQSGATNDNHFFGYSTPWGYFDFNRFHCHFSPRDWQRLINNNWGFRPRKLRFKLFNIQVKEVTTNDGVTTIANNLTSTIQVFSDSEYQLPYVLGSAHQGCLPPFPADVFMIPQYGYLTLNNGSQSVGRSSFYCLEYFPSQMLRTGNNFEFSYTFEEVPFHSSYAHSQSLDRLMNPLIDQYLYYLARTQSTTGSTRELQFHQAGPNTMAEQSKNWLPGPCYRQQRLSKNIDSNNNSNFAWTGATKYHLNGRNSLTNPGVAMATNKDDEDQFFPINGVLVFGKTGAANKTTLENVLMTSEEEIKTTNPVATEEYGVVSSNLQSSTAGPQTQTVNSQGALPGMVWQNRDVYLQGPIWAKIPHTDGNFHPSPLMGGFGLKHPPPQILIKNTPVPANPPEVFTPAKFASFITQYSTGQVSVEIEWELQKENSKRWNPEIQYTSNYAKSNNVEFAVNNEGVYTEPRPIGTRYLTRNL

SEQ ID NO: 4759 - protein, 728 aa, Adeno-associated virus
MAADGYLPDWLEDNLSEGIREWWDLKPGAPKPKANQQKQDDGRGLVLPGYKYLGPFNGLDKGEPVNAADAAALEHDKAYDQQLKAGDNPYLRYNHADAEFQERLQEDTSFGGNLGRAVFQAKKRVLEPLGLVEEGAKTAPGKKRPIESPDSSTGIGKKGQQPAKKKLNFGQTGDSESVPDPQPIGEPPAGPSGLGSGTMAAGGGAPMADNNEGADGVGNASGNWHCDSTWLGDRVITTSTRTWALPTYNNHLYKQISSQSGATNDNHFFGYSTPWGYFDFNRFHCHFSPRDWQRLINNNWGFRPRKLRFKLFNIQVKEVTTNDGVTTIANNLTSTIQVFSDSEYQLPYVLGSAHQGCLPPFPADVFMIPQYGYLTLNNGSQSVGRSSFYCLEYFPSQMLRTGNNFEFSYTFEEVPFHSSYAHSQSLDRLMNPLIDQYLYYLARTQSTTGSTRELQFHQAGPNTMAEQSKNWLPGPCYRRQRLSKDIDSNNNSNFAWTGATKYHLNGRNSLTNPGVAMATNKDDEDQFFPINGVLVFGKTGAANKTTLENVLMTSEEEIKTTNPVATEEYGVVSSNLQSSTAGPQTQTVNSQGALPGMVWQNRDVYLQGPIWAKIPHTDGNFHPSPLMGGFGLKHPPPQILIKNTPVPANPPEVFTPAKFASFITQYSTGQVSVEIEWELQKENSKRWNPEIQYTSNYAKSNNVEFAVNNEGVYTEPRPIGTRYLTRNL

SEQ ID NO: 4760 - protein, 685 aa, Adeno-associated virus
MAADGYLPDWLEDNLSEGIREWWDLKPGAPKPKANQQKQDDGRGLVLPGYKYLGPFNGLDKGEPVNEADAAALEHDKAYDKQLEQGDNPYLKYNHADAEFQERLQEDTSFGGNLGRAVFQAKKRVLEPLGLVEEGAKTAPGKKRPVEPSPQRSPDSSTGIGKTGQQPAKKRLNFGQTGDSESVPDPQPIGEPPAGPSGLGSGTMAAGGGAPMADNNEGADGVGSSSGNWHCDSTWLGDRVITTSTRTWALPTYNNHLYKQISNGTSGGSTNDNTYFGYSTPWGYFDFNRFHCHFSPRDWQRLINNNWGFRPKRLNFKLFNIQVKEVTQNEGTKTIANNLTSTIQVFTDSEYQLPYVLGSAHQGCLPPFPADVFMIPQYGYLTLNNGSQAVGRSSFYCLEYFPSQMLRTGNNFEFSYQFEDVPFHSSYAHSQSLDRLTNPLIDQYLYYLARTQSTTGSTRGLQFHQAGPNTMAEQSKNWLPGPCYRQQRLSKNIDSNNNSNFAWTGATKYHLNGRNSLTNPGVAMATNKDDEDQFFPINGVLVFGKTGAANKTTLENVLMTSEEEIKTTNPVATEEYGVVSSNLQSSTAGPQTQTVNSQGALPGMVWQNRDVYLQGPIWAKIPHTDGNFHPSPLMGGFGLKHPPPQILIKYTSNYYKSTNVDFAVNTEGTYSEPRPIGTRYLTRNL

SEQ ID NO: 4761 - protein, 733 aa, Adeno-associated virus
MAADGYLPDWLEDNLSEGIREWWDLKPGAPKPKANQQKQDDGRGLVLPGYKYLGPFNGLDKGEPVNAADAAALEHDKAYDQQLKAGDNPYLRYNHADAEFQERLQEDTSFGGNLGRAVFQAKKRVLEPLGLVEEGAKTAPGKKRPIESPDSSTGIGKKGQQPAKKKLNFGQTGDSESVPDPQPIGEPPAGPSGLGSGTMAAGGGAPMADNNEGADGVGSSSGNWHCDSTWLGDRVITTSTRTWALPTYNNHLYKQISNGTSGGSTNDNTYFGYSTPWGYFDFNRFHCHFSPRDWQRLINNNWGFRPKRLNFKLFNIQVKEVTQNEGTKTIANNLTSTIQVFTDSEYQLPYVLGSAHQGCLPPFPADVFMIPQYGYLTLNNGSQAVGRSSFYCLEYFPSQMLRTGNNFEFSYQFEDVPFHSSYAHSQSLDRLMNPLIDQYLYYLSRTQSTGGTAGTQQLLFSQAGPNNMSAQAKNWLPGPCYRQQRVSTTVSQNNNSNFAWTGATKYHLNGRDSLVNPGVAMATHKGDEERFFPSSGVLMFGKQGAGKDNVDYSSVMLTSEEEIKTTNPVATEQYGVVADNLQQQNAAPIVGAVNSQGALPGMVWQNRDVYLQGPIWAKIPHTDGNFHPSPLMGGFGLKHPPPQILIKNTPVPADPPTTFSQAKLASFITQYSTGQVSVEIEWELQKENSKRWNPEIQYTSNYYKSTNVDFAVNTEGTYSEPRPIGTRYLTRSL

SEQ ID NO: 4762 - protein, 738 aa, Adeno-associated virus
MAADGYLPDWLEDNLSEGIREWWDLKPGAPKPKANQQKQDDGRGLVLPGYKYLGPFNGLDKGEPVNAADAAALEHDKAYDQQLKAGDNPYLRYNHADAEFQERLQEDTSFGGNLGRAVFQAKKRVLEPLGLVEEGAKTAPGKKRPVEPSPQRSPDSSTGIGKTGQQPAKKRLNFGQTGDSESVPDPQPIGEPPAGPSGLGSGTMAAGGGAPMADNNEGADGVGSSSGNWHCDSTWLGDRVITTSTRTWALPTYNNHLYKQISNGTSGGSTNDNTYFGYSTPWGYFDFNRFHCHFSPRDWQRLINNNWGFRPKRLNFKLFNIQVKEVTQNEGTKTIANNLTSTIQVFTDSEYQLPYVLGSAHQGCPPPFPADVFMIPQYGYLTLNNGSQAVGRSSFYCLEYFPSQMRRTGNNFEFSYQFEDVPFHSSYAHSQSLDRLMNPLIDQYLYYLSRTQSTGGTAGTQQLLFSQAGPNNMSAQAKNWLPGPCYRQQRVSTTLSQNNNSNFAWTGATKYHLNGRDSLVNPGVAMATHKDDEERFFPSSGVLMFGKQGAGKDNVDYSSVMLTSEEEIKTTNPVATEQYGVVADNLQQQNAAPIVGAVNSQGALPGMVWQNRDVYLQGPIWAKIPHTDGNFHPSPLMGGFGLKHPPPQILIKNTPVPADPPTTFSQAKLASFITQYSTGQVSVEIEWELQKENSKRWNPEIQYTSNYYKSTNVDFAVNTEGTYSEPRPIGTRYLTRNL

SEQ ID NO: 4763 - protein, 733 aa, Adeno-associated virus
MAADGYLPDWLEDNLSEGIREWWDLRPGAPKPKANQQKQDDGRGLVLPGYKYLGPFNGLDKGEPVNEADAAALEHDKAYDKQLEQGDNPYLKYNHADAEFQERLQEDTSFGGNLGRAVFQAKKRVLEPLGLVEEGAKTAPGKKRPIESPDSSTGIGKKGQQPAKKRLNFGQTGDSESVPDPQPIGEPPAGPSGLGSGTMAAGGGAPMADNNEGADGVGSSSGNWHCDSTWLGDRVITTSTRTWALPTYNNHLYKQISNGTSGGSTNDNTYFGYSTPWGYFDFNRFHCHFSPRDWQRLINNNWGFRPKRLNFKLFNIQVKEVTQNEGTKTIANNLTSTIQVFTDSEYQLPYVLGSAHQGCLPPFPADVFMIPQYGYLTLNNGSQAVGRSSFYCLEYFPSQMLRTGNNFEFSYQFEDVPFHSSYAHSQSLDRLMNPLIDQYLYYLSRTQSTGGTAGTQQLLFSQAGPNNMSAQAKNWLPGPCYRQQRVSTTVSQNNNSNFAWTGATKYHLNGRDSLVNPGVAMATHKGDEERFFPSSGVLMFGKQGAGKDNVDYSSVMLTSEEEIKTTNPVATEQYGVVADNLQQQNAAPIVGAVNSQGALPGMVWQNRDVYLQGPIWAKIPHTDGNFHPSPLMGGFGLKHPPPQILIKNTPVPADPPTTFSQAKLASFITQYSTGQVSVEIEWELQKENSKRWNPEIQYTSNYYKSTNVDFAVNTEGTYSEPRPIGTRYLTRNL

SEQ ID NO: 4764 - DNA, 3098 bp, Adeno-associated virus
gaattcgccctttctacggctgcgtcaactggaccaatgagaactttcccttcaacgattgcgtcgacaagatggtgatctggtgggaggagggcaagatgacggccaaggtcgtggagtccgccaaggccattctcggcggcagcaaggtgcgcgtggaccaaaagtgcaagtcttccgcccagatcgatcccacccccgtgatcgtcacttccaacaccaacatgtgcgctgtgattgacgggaacagcaccaccttcgagcaccagcagccgttacaagaccggatgttcaaatttgaactcacccgccgtctggagcacgactttggcaaggtgacaaagcaggaagtcaaagagttcttccgctgggcgcaggatcacgtgaccgaggtggcgcatgagttctacgtcagaaagggtggagccaacaagagacccgcccccgatgacgcggataaaagcgagcccaagcgggcctgcccctcagtcgcggatccatcgacgtcagacgcggaaggagctccggtggactttgccgacaggtaccaaaacaaatgttctcgtcacgcgggcatgcttcagatgctgtttccctgcaagacatgcgagagaatgaatcagaatttcaacatttgcttcacgcacgggaccagagactgttcagaatgtttccccggcgtgtcagaatctcaaccggtcgtcagaaagaggacgtatcggaaactctgtgccattcatcatctgctggggcgggctcccgagattgcttgctcggcctgcgatctggtcaacgtggacctggatgaccgtgtttctgagcaataaatgacttaaaccaggtatggctgccgatggttatcttccagattggctcgaggacaacctctctgagggcattcgcgagtggtgggacttgaaacctggagccccgaaacccaaagccaaccagcaaaagcaggacgacggccggggtctggtgcttcctggctacaagtacctcggacccttcaacggactcgacaagggagagccggtcaacgaggcagacgccgcggccctcgagcacgacaaggcctacgacaagcagctcgagcagggggacaacccgtacctcaagtacaaccacgccgacgccgagtttcaggagcgtcttcaagaagatacgtcttttgggggcaacctcgggcgagcagtcttccaggccaagaagcgggttctcgaacctctcggtctggttgaggaaggcgctaagacggctcctggaaagaagagacccatagaatcccccgactcctccacgggcatcggcaagaaaggccagcagcccgctaaaaagaagctcaactttgggcagactggcgactcagagtcagtgcccgacccccaacctctcggagaacctcccgccgcgccctcaggtctgggatctggtacaatggctgcaggcggtggcgcaccaatggcagacaataacgaaggcgccgacggagtgggtaatgcctccggaaattggcattgcgattccacatggctgggcgacagagtcatcaccaccagcacccgcacctgggccctgcccacctacaacaaccacctctacaagcagatatcaagtcagagcggggctaccaacgacaaccacttcttcggctacagcaccccctggggctattttgacttcaacagattccactgccacttctcaccacgtgactggcagcgactcatcaacaacaactggggattccggcccagaaagctgcggttcaagttgttcaacatccaggtcaaggaggtcacgacgaacgacggcgttacgaccatcgctaataaccttaccagcacgattcaggtcttctcggactcggagtaccaactgccgtacgtcctcggctctgcgcaccagggctgcctccctccgttccctgcggacgtgttcatgattcctcagtacggatatctgactctaaacaacggcagtcagtctgtgggacgttcctccttctactgcctggagtactttccttctcagatgctgagaacgggcaataactttgaattcagctacacctttgaggaagtgcctttccacagcagctatgcgcacagccagagcctggaccggctgatgaatcccctcatcgaccagtacctgtactacctggcccggacccagagcactacggggtccacaagggagctgcagttccatcaggctgggcccaacaccatggccgagcaatcaaagaactggctgcccggaccctgttatcggcagcagagactgtcaaaaaacatagacagcaacaacaacagtaactttgcctggaccggggccactaaataccatctgaatggtagaaattcattaaccaacccgggcgtagccatggccaccaacaaggacgacgaggaccagttctttcccatcaacggagtgctggtttttggcgaaacgggggctgccaacaagacaacgctggaaaacgtgctaatgaccagcgaggaggagatcaaaaccaccaatcccgtggctacagaagaatacggtgtggtctccagcaacctgcaatcgtctacggccggaccccagacacagactgtcaacagccagggggctctgcccggcatggtctggcagaaccgggacgtgtacctgcagggtcccatctgggccaaaattcctcacacggacggcaactttcacccgtctcccctgatgggcggatttggactcaaacacccgcctcctcaaattctcatcaaaaacaccccggtacctgctaatcctccagaggtgtttactcctgccaagtttgcctcatttatcacgcagtacagcaccggccaggtcagcgtggagatcgagtgggaactgcagaaagaaaacagcaaacgctggaatccagagattcagtacacctcaaattatgccaagtctaataatgtggaatttgctgtcaacaacgaaggggtttatactgagcctcgccccattggcacccgttacctcacccgtaacctgtaattgcctgttaatcaataaaccggttaattcgtttcagttgaactttggtctctgcgaagggcgaattc

SEQ ID NO: 4765 - protein, 728 aa, Adeno-associated virus
MAADGYLPDWLEDNLSEGIREWWDLKPGAPKPKANQQKQDDGRGLVLPGYKYLGPFNGLDKGEPVNEADAAALEHDKAYDKQLEQGDNPYLKYNHADAEFQERLQEDTSFGGNLGRAVFQAKKRVLEPLGLVEEGAKTAPGKKRPIESPDSSTGIGKKGQQPAKKKLNFGQTGDSESVPDPQPLGEPPAAPSGLGSGTMAAGGGAPMADNNEGADGVGNASGNWHCDSTWLGDRVITTSTRTWALPTYNNHLYKQISSQSGATNDNHFFGYSTPWGYFDFNRFHCHFSPRDWQRLINNNWGFRPRKLRFKLFNIQVKEVTTNDGVTTIANNLTSTIQVFSDSEYQLPYVLGSAHQGCLPPFPADVFMIPQYGYLTLNNGSQSVGRSSFYCLEYFPSQMLRTGNNFEFSYTFEEVPFHSSYAHSQSLDRLMNPLIDQYLYYLARTQSTTGSTRELQFHQAGPNTMAEQSKNWLPGPCYRQQRLSKNIDSNNNSNFAWTGATKYHLNGRNSLTNPGVAMATNKDDEDQFFPINGVLVFGETGAANKTTLENVLMTSEEEIKTTNPVATEEYGVVSSNLQSSTAGPQTQTVNSQGALPGMVWQNRDVYLQGPIWAKIPHTDGNFHPSPLMGGFGLKHPPPQILIKNTPVPANPPEVFTPAKFASFITQYSTGQVSVEIEWELQKENSKRWNPEIQYTSNYAKSNNVEFAVNNEGVYTEPRPIGTRYLTRNL

SEQ ID NO: 4766 - protein, 733 aa, Adeno-associated virus
MAADGHLPDWLEDNLSEGIREWWDLKPGAPKPKANQQKQDDGRGLVLPGYKYLGPFNGLDKGEPVNAADAAALEHDKAYDQQLKAGDNPYLRYNHADAEFQERLQEDTSFGGNLGRAVFQAKKRVLEPLGLVEEGAKTAPGKKRPIESPDSSTGIGKKGQQPAKKKLNFGQTGDSESVPDPQPIGEPPAGPSGLGSGTMAAGGGAPMADNNEGADGVGSSSGNWHCDSTWLGDRVITTSTRTWALPTYNNHLYKQISNGTSGGSTNDNTYFGYSTPWGYFDFNRFHCHFSPRDWQRLINNSWGFRPKRLNFKLFNIQVKEVTQNEGTKTIANNLTSTIQVFTDSEYQLPYVLGSAHQGCLPPFPADVFMIPQYGYLTLNNGSQAVGRSSFYCLEYFPSQMLRTGNNFEFSYQFEDVPFHSSYAHSQSLDRLMNPLIDQYLYYLSRTQSTGGTAGTQQLLFSQAGPNNMSAQAKNWLPGPCYRQQRVSTTLSQNNNSNFAWTGATKYHLNGRDSLVNPGVAMATHKDDEERFFPSSGVLMFGKQGAGKDNVDYSSVMLTSEEEIKTTNPVATEQYGVVADNLQQQNAAPIVGAVNSQGALPGMVWQNRDVYLQGPIWAKIPHTDGNFHPSPLMGGFGLKHPPPQILIKNTPVPADPPTTFSQAKLASFITQYSTGQVSVEIEWELQKENSKRWNPEIQYTSNYYKSTNVDFAVNTEGTYSEPRPIGTRYLTRNL

SEQ ID NO: 4767 - DNA, 2495 bp, Adeno-associated virus
gaattcgccctttctacggctgcgtcaactagaccaatgagaactttcccttcaacgattgcgtcgacaagatggtgatctggtgggaggagggcaagatgacggccaaggtcgtggagtccgccaaggccattcatcatctgctggggcgggctcccgagattgcttgctcggcctgcgatctggtcaacgtggacctggatgactgtgtttctgagcaataaatgacttaaaccaggtatggctgccgatggttatcttccagattggctcgaggacaacctctctgagggcattcgcgagtggtgggacttgaaacctggagccccgaaacccaaagccaaccagcaaaagcaggacgacggccggggtctggtgcttcctggctacaagtacctcggacccttcaacggactcgacaagggagagccggtcaacgaggcagacgccgcggccctcgagcacgacaaggcctacgacaagcagctcgagcagggggacaacccgtacctcaagtacaaccacgccgacgccgagtttcaggagcgtcttcaagaagatacgtcttttgggggcaacctcgggcgagcagtcttccaggccaagaagcgggttctcgaacctctcggtctggttgaggaaggcgctaagacggctcctggaaagaagagacccatagaatcccccgactcctccacgggcatcggcaagaaaggccagcagcccgctaaaaagaagctcaactttgggcagactggcgactcagagtcagtgcccgaccctcaaccaatcggagaaccccccgcaggcccctctggtctgggatctggtacaatggctgcaggcggtggcgctccaatggcagacaataacgaaggcgccgacggagtgggtaatgcctccggaaattggcattgcgattccacatggctgggcgacagagtcatcaccaccagcacccgcacctgggccctgcccacctacaacaaccacctctacaagcagatatcaagtcagagcggggctaccaacgacaaccacttcttcggctacagcaccccctggggctattttgacttcaacagattccactgccacttctcaccacgtgactggcagcgactcatcaacaacaactggggattccggcccagaaagctgcggttcaagttgttcaacatccaggtcaaggaggtcacgacgaacgacggcgttacgaccatcgctaataaccttaccagcacgattcaggtcttctcggactcggagtaccaactgccgtacgtcctcggctctgcgcaccagggctgcctccctccgttccctgcggacgtgttcatgattcctcagtacggatatctgactctaaacaacggcagtcagtctgtgggacgttcctccttctactgcctggagtactttccttctcagatgctgagaacgggcaataactttgaattcagctacacctttgaggaagtgcctttccacagcagctatgcgcacagccagagcctggaccggctgatgaatcccctcatcgaccagtacctgtactacctggcccggacccagagcactacggggtccacaagggagctgcagttccatcaggctgggcccaacaccatggccgagcaatcaaagaactggctgcccggaccctgttatcggcagcagagactgtcaaaaaacatagacagcaacaacaccagtaactttgcctggaccggggccactaaataccatctgaatggtagaaattcattaaccaacccgggcgtagccatggccaccaacaaggacgacgaggaccagttctttcccatcaacggagtgctggtttttggcaaaacgggggctgccaacaagacaacgctggaaaacgtgctaatgaccagcgaggaggagatcaaaaccaccaatcccgtggctacagaacagtacggtgtggtctccagcaacctgcaatcgtctacggccggaccccagacacagactgtcaacagccagggggctctgcccggcatggtctggcagaaccgggacgtgtacctgcagggtcccatctgggccaaaattcctcacacggacggcaactttcacccgtctcccctgatgggcggatttggactcaaacacccgcctcctcaaattctcatcaaaaacaccccggtacctgctaatcctccagaggtgtttactcctgccaagtttgcctcatttatcacgcagtacagcaccggccaggtcagcgtggagatcgagtgggaactgcagaaagaaaacagcaaacgctggaatccagagattcagtacacctcaaattatgccaagtctaataatgtggaatttgctgtcaacaacgaaggggtttatactgagcctcgccccattggcacccgttacctcacccgtaacctgtaattgcctgttaatcaataaaccggttaattcgtttcagttgaactttggtctctgcgaagggcgaattc

SEQ ID NO: 4768 - protein, 728 aa, Adeno-associated virus
MAADGYLPDWLEDNLSEGIREWWDLKPGAPKPKANQQKQDDGRGLVLPGYKYLGPFNGLDKGEPVNEADAAALEHDKAYDKQLEQGDNPYLKYNHADAEFQERLQEDTSFGGNLGRAVFQAKKRVLEPLGLVEEGAKTAPGKKRPIESPDSSTGIGKKGQQPAKKKLNFGQTGDSESVPDPQPIGEPPAGPSGLGSGTMAAGGGAPMADNNEGADGVGNASGNWHCDSTWLGDRVITTSTRTWALPTYNNHLYKQISSQSGATNDNHFFGYSTPWGYFDFNRFHCHFSPRDWQRLINNNWGFRPRKLRFKLFNIQVKEVTTNDGVTTIANNLTSTIQVFSDSEYQLPYVLGSAHQGCLPPFPADVFMIPQYGYLTLNNGSQSVGRSSFYCLEYFPSQMLRTGNNFEFSYTFEEVPFHSSYAHSQSLDRLMNPLIDQYLYYLARTQSTTGSTRELQFHQAGPNTMAEQSKNWLPGPCYRQQRLSKNIDSNNTSNFAWTGATKYHLNGRNSLTNPGVAMATNKDDEDQFFPINGVLVFGKTGAANKTTLENVLMTSEEEIKTTNPVATEQYGVVSSNLQSSTAGPQTQTVNSQGALPGMVWQNRDVYLQGPIWAKIPHTDGNFHPSPLMGGFGLKHPPPQILIKNTPVPANPPEVFTPAKFASFITQYSTGQVSVEIEWELQKENSKRWNPEIQYTSNYAKSNNVEFAVNNEGVYTEPRPIGTRYLTRNL

SEQ ID NO: 4769 - DNA, 2504 bp, Adeno-associated virus
gaattcgccctttctacggctgcgtcaactggaccaatgagaactttcccttcaacgattgcgtcgacaagatggtgatctggtgggaggagggcaagatgacggccaaggtcgtggagtccgccaaggccattcatcatctgctggggcgggctcccgagattgcttgctcggcctgcgatctggtcaacgtggacctggatgactgtgtttctgagcaataaatgacttaaaccaggtatggctgccgatggttatcttccagattggctcgaggacaacctctctgagggcattcgcgagtggtgggacttgaaacctggagccccgaaacccaaagccaaccagcaaaagcaggacgacggccggggtctggtgcttcctggctacaagtacctcggacccttcaacggactcgacaagggagagccggtcaacgaggcagacgccgcggccctcgagcacgacaaggcctacgacaagcagctcgagcagggggacaacccgtacctcaagtacaaccacgccgacgccgagtttcaggagcgtcttcaagaagatacgtcttttgggggcaacctcgggcgagcagtcttccaggccaagaagcgggttctcgaacctctcggtctggttgaggaaggcgctaagacggctcctggaaagaagagacccatagaatcccccgactcctccacgggcatcggcaagaaaggccagcagcccgctaaaaagaagctcaactttgggcagactggcgactcagagtcagtgcccgaccctcaaccaatcggagaaccccccgcaggcccctctggtctgggatctggtacaatggctgcaggcggtggcgctccaatggcagacaataacgaaggcgccgacggagtgggtaatgcctccggaaattggcattgcgattccacatggctgggcgacagagtcatcaccaccagcacccgcacctgggccctgcccacctacaacaaccacctctacaagcagatatcaagtcagagcggggctaccaacgacaaccacttcttcggctacagcaccccctggggctattttgacttcaacagattccactgccacttctcatcacgtgactggcagcgactcatcaacaacaactggggattccggcccaagagactcaacttcaagctcttcaacatccaggtcaaggaggtcacgcagaatgaaggcaccaagaccatcgccaataaccttaccagcacgattcaggtctttacggactcggaataccggctcccgtacgtcctcggctctgcgcaccagggctgcctgcctccgttcccggcggacgtcttcatgattcctcagtacgggtacctgactctgaacaacggcagtcaggccgtgggccgttcctccttctactgcctggagtactttccttctcaaatgctgagaacgggcaacaactttgagttcagctaccagtttgaggacgtgccttttcacagcagctacgcgcacagccaaagcctggaccggctgatgaaccccctcatcgaccagtacctgtactacctgtctcggactcagtccacgggaggtaccgcaggaactcagcagttgctattttctcaggccgggcctaataacatgtcggctcaggccaaaaactggctacccgggccctgctaccggcagcaacgcgtctccacgacactgtcgcaaaataacaacagcaactttgcttggaccggtgccaccaagtatcatctgaatggcagagactctctggtaaatcccggtgtcgctatggcaacgcacaaggacgacgaagagcgattttttccatccagcggagtcttgatgtttgggaaacagggagctggaaaagacaacgtggactatagcagcgttatgctaaccagtgaggaagaaatcaaaaccaccaacccagtggccacagaacagtacggcgtggtggccgataacctgcaacagcaaaacgccgctcctattgtaggggccgtcaacagtcaaggagccttacctggcatggtctggcagaaccgggacgtgtacctgcagggtcctatctgggccaagattcctcacacggacggcaactttcatccttcgccgctgatgggaggctttggactgaaacacccgcctcctcagatcctgattaagaatacacctgttcccgcggatcctccaactaccttcagtcaagccaagccggcgtcgttcatcacgcagtacagcaccggacaggtcagcgtggaaattgaatgggagctgcagaaagagaacagcaagcgctggaacccagagattcagtatacttccaactactacaaatctacaaatgtggactttgctgtcaatactgagggtacttattcagagcctcgccccattggcacccgttacctcacccgtaacctgtaattgcctgttaatcaataaaccggttaattcgtttcagttgaactttggtctctgcgaagggcgaattc

SEQ ID NO: 4770 - protein, 731 aa, Adeno-associated virus
MAADGYLPDWLEDNLSEGIREWWDLKPGAPKPKANQQKQDDGRGLVLPGYKYLGPFNGLDKGEPVNEADAAALEHDKAYDKQLEQGDNPYLKYNHADAEFQERLQEDTSFGGNLGRAVFQAKKRVLEPLGLVEEGAKTAPGKKRPIESPDSSTGIGKKGQQPAKKKLNFGQTGDSESVPDPQPIGEPPAGPSGLGSGTMAAGGGAPMADNNEGADGVGNASGNWHCDSTWLGDRVITTSTRTWALPTYNNHLYKQISSQSGATNDNHFFGYSTPWGYFDFNRFHCHFSSRDWQRLINNNWGFRPKRLNFKLFNIQVKEVTQNEGTKTIANNLTSTIQVFTDSEYRLPYVLGSAHQGCLPPFPADVFMIPQYGYLTLNNGSQAVGRSSFYCLEYFPSQMLRTGNNFEFSYQFEDVPFHSSYAHSQSLDRLMNPLIDQYLYYLSRTQSTGGTAGTQQLLFSQAGPNNMSAQAKNWLPGPCYRQQRVSTTLSQNNNSNFAWTGATKYHLNGRDSLVNPGVAMATHKDDEERFFPSSGVLMFGKQGAGKDNVDYSSVMLTSEEEIKTTNPVATEQYGVVADNLQQQNAAPIVGAVNSQGALPGMVWQNRDVYLQGPIWAKIPHTDGNFHPSPLMGGFGLKHPPPQILIKNTPVPADPPTTFSQAKPASFITQYSTGQVSVEIEWELQKENSKRWNPEIQYTSNYYKSTNVDFAVNTEGTYSEPRPIGTRYLTRNL

SEQ ID NO: 4771 - protein, 731 aa, Adeno-associated virus
MAADGYLPDWLEDNLSEGIREWWDLKPGAPKPKANQQKQDDGRGLVLPGYKYLGPFNGLDKGEPVNEADAAALEHDKAYDKQLEQGDNPYLKYNHADAEFQERLQEDTSFGGNLGRAVFRAKKRVLEPLGLVEEGAKTAPGKKRPIESPDSSTGIGKKGQQPAKKKLNFGQTGDSESVPDPQPLGEPPAAPSGLGSGTMAAGGGAPMADNNEGADGVGNASGNWHCDSTWLGDRVITTSTRTWALPTYNNHLYKQISSQSGATNDNHFFGYSTPWGYFDFNRFHCHFSPRDWQRLINNNRGFRPRKLRFKLFNIQVKEVTTNDGVTTIANNLTSTIQVFSDSEYQLPYVLGSAHQGCLPPFPADVFMIPQYGYLTLNNGSQSVGRSSFYCLEYFPSQMLRTGNNFEFSYQFEDVPFHSSYAHSQSLDRLMNPLIDQYLYYLSRTQSTGGTAGTQQLLFSQAGPNNMSAQAKNWLPGPCYRQQRVSTTLSQNNNSNFAWTGATKYHLNGRDSLVNPGVAMATHKDDEERFFPSSGVLMFGKQGAGKDNVDYSSVMLTSEEEIKTTNPVATEQYGVVADNLQQQNAAPIVGAVNSQGALPGMAWQNRDVYLQGPIWAKIPHTDGNFHPSPLMGGFGLKHPPPQILIKNTPVPADPPTTFSQAKLASFITQYSTGQVSVEIEWELQKENSKRWNPEIQYTSNYYKSTNVDFAVNTEGTYSEPRPIGTRYLTRNL

SEQ ID NO: 4772 - protein, 738 aa, Adeno-associated virus
MAADGYLPDWLEDNLSEGIREWWDLKPGAPKPKANQQKQDDGRGLVLPGYKYLGPFNGLDKGEPVNEADAAALEHDKAYDKQLEQGDNPYLKYNHADAEFQERLQEDTSFGGNLGRAVFQAKKRVLEPLGLVEEGAKTAPGKKRPVEPSPQRSPDSSTGIGKTGQQPAKKRLNFGQTGDSESVPDPQPIGEPPAGPSGLGSGTMAAGGGAPMADNNEGADGVGSSSGNWHCDSTWLGDRVITTSTRTWALPTYNNHLYKQISNGTSGGSTNDNTYFGYSTPWGYFDFNRFHCHFSPRDWQRLINNNWGFRPKRLNFKLFNIQVKEVTQNEGTKTIANNLTSTIQVFTDSEYQLPYVLGSAHQGCLPPFPADVFMIPQYGYLTLNNGSQAVGRSSFYCLEYFPSQMLRTGNNFEFSYQFEDVPFHSSYAHSQSLDRLMNPLIDQYLYYLSRTQSTGGTAGTQQLLFSQAGPNNMSAQAKNWLPGPCYRQQRVSTTLSQNNNSNFAWTGATKYHLNGRDSLVNPGVAMATHKDDEERFFPSSGVLMFGKQGAGKDNVDYSSVMLTSEEEIKTTNPVATEQYGVVADNLQQQNAAPIVGAVNSQGALPGMVWQNRDVYLQGPIWAKIPHTDGNFHPSPLMGGFGLKHPPPQILIKNTPVPADPPTTFSQAKLASFITQYSTGQVSVEIEWELQKENSKRWNPEIQYTSNYYKSTNVDFAVNTEGTYSEPRPIGTRYLTRNL

SEQ ID NO: 4773 - protein, 735 aa, Adeno-associated virus
MAADGYLPDWLEDNLSEGIREWWDLKPGAPKPKANQQKQDDGRGLVLPGYKYLGPFNGLDKGEPVNEADAAALEHDKAYDKQLEQGDNPYLKYNHADAEFQERLQEDTSFGGNLGRAVFQAKKRVLEPLGLVEEGAKTAPGKKRPVEPSPQRSPDSSTGIGKTGQQPAKKRLNFGQTGDSESVPDPQPIGEPPAGPSGLGSGTMAAGGGAPMADNNEGADGVGSSSGNWHCDSTWLGDRVITTSTRTWALPTYNNHLYKQISNGTSGGSTNDNTYFGYSTPWGYFDFNRFHCHFSPRDWQRLINNNWGFRPRKLRFKLFNIQVKEVTTDDGVTTIANNLTSTIQVFSDSEYQLPYVLGSAHQGCLPPFPADVFMIPQYGYLTLNNGSQSVGRSSFYCLEYFPSQMLRTGNNFEFSYTFEEVPFHSSYAHSQSLDRLMNPLIDQYLYYLARTQSTTGSTRELQFHQAGPNTMAEQSKNWLPGPCYRQQRLSKNIDSNNNSNFAWTGATKYHLNGRNSLTNPGVAMATNKDDEDQFFPINGVLVFGKTGAANKTTLENVLMTSEEEIKTTNPVATEEYGVVSSNLQSSTAGPQTQTVNSQGALPGMVWQNRDVYLQGPIWAKIPHTDGNFHPSPLMDGFGLKHPPPQILIKNTPVPANPPEVFTPAKFASFITQYSTGQVSVEIEWELQKENSKRWNPEIQYTSNYAKSNNVEFAVNNEGVYTEPRPIGTRYLTRNL

SEQ ID NO: 4774 - DNA, 3128 bp, Adeno-associated virus
gaattcgccctttctacggctgcgtcaactggaccaatgagaactttcccttcaacgattgcgtcgacaagatggtgatctggtgggaggagggcaagatgacggccaaggtcgtggagtccgccaaggccattctcggcggcagcaaggtgcgcgtggaccaaaagtgcaagtcttccgcccagatcgatcccacccccgtgatcgtcacttccaacaccaacatgtgcgccgtgattgacgggaacagcaccaccttcgagcaccagcagccgttacaagaccggatgttcaaatttgaactcacccgccgtctggagcacgactttggcaaggtgacaaagcaggaagtcaaagagttcttccgctgggcgcaggatcacgtgaccgaggtggcgcatgagttctacgtcagaaagggtggagccaacaagagacccgcccccgatgacgcggataaaagcgagcccaagcgggcctgcccctcagtcgcggatccatcgacgtcagacgcggaaggagctccggtggactttgccgacaggtaccaaaacaaatgttctcgtcacgcgggcatgcttcagatgctgtttccctgcaagacatgcgagagaatgaatcagaatttcaacatttgcttcacgcacgggaccagagactgttcagaatgtttccccggcgtgtcagaatctcaaccggtcgtcagaaagaggacgtatcggaaactctgtgccattcatcatctgctagggcgggctcccgagattgcttgctcggcctgcgatctggtcaacgtggacctggatgactgtgtttctgagcaataaatgacttaaaccaggtatggctgccgatggttatcttccagattggctcgaggacaacctctctgagggcattcgcgagtggtgggacttgaaacctggagccccgaaacccaaagccaaccagcaaaagcaggacgacggccggggtctggtgcttcctggctacaagtacctcggacccttcaacggactcgacaagggggagcccgtcaacgcggcggacgcagcggccctcgagcacgacaaggcctacgaccagcagctcaaagcgggtgacaatccgtacctgcggtataaccacgccgacgccgagtttcaggagcgtctgcaagaagatacgtcttttgggggcaacctcgggcgagcagtcttccaggccaagaagcgggttctcgaacctctcggtctggttgaggaaggcgctaagacggctcctggaaagaagagaccggtagagccatcaccccagcgttctccagactcctctacgggcatcggcaagacaggccagcagcccgcgaaaaagagactcaactttgggcagactggcgactcagagtcagtgcccgaccctcaaccaatcggagaaccccccgcaggcccctctggtctgggatctggtacaatggctgcaggcggtggcgctccaatggcagacaataacgaaggcgccgacggagtgggtagttcctcaggaaattggcattgcgattccacatggctgggcgacagagtcatcaccaccagcacccgaacctgggccctccccacctacaacaaccacctctacaagcaaatctccaacgggacatcgggaggaagcaccaacgacaacacctacttcggctacagcaccccctgggggtattttgactttaacagattccactgccacttctcaccacgtgactggcagcgactcatcaacaacaactggggattccggcccaagagactcaacttcaagctcttcaacatccaggtcaaggaggtcacgcagaatgaaggcaccaagaccatcgccaataaccttaccagcacgattcaggtctttacggactcggaataccagctcccgtacgtcctcggctctgcgcaccagggctgcctgcctccgttcccggcggacgtcttcatgattcctcagtacgggtacctgactctgaacaacggcagtcaggccgtgggccgttcctccttctactgcctggagtactttccttctcaaatgctgagaacgggcaacaactttgagttcagctaccagtttgaggacgtgccttttcacagcagctacgcgcacagccaaagcctggaccggctgatgaaccccctcatcgaccagtacctgtactacctgtctcggactcagtccacgggaggtaccgcaggaactcagcagttgctattttctcaggccgggcctaataacatgtcggctcaggccaaaaactggctacccgggccctgctaccggcagcaacgcgtctccacgacactgtcgcaaaataacaacagcaactttgcttggaccggtgccaccaagtatcatctgaatggcagagactctctggtaaatcccggtgtcgctatggcaacgcacaaggacgacgaagagcgattttttccatccagcggagtcttgatgtttgggaaacagggagctggaaaagacaacgtggactatagcagcgttatgctaaccagtgaggaagaaatcaaaaccaccaacccagtggccacagaacagtacggcgtggtggccgataacctgcaacagcaaaacgccgctcctattgtaggggccgtcaacagtcaaggagccttacctggcatggtctggcagaaccgggacgtgtacctgcagggtcctatctgggccaagattcctcacacggacggcaactttcatccttcgccgctgatgggaggctttggactgaaacacccgcctcctcagatcctgattaagaatacacctgttcccgcggatcctccaactaccttcagtcaagccaagctggcgtcgttcatcacgcagtacagcaccggacaggtcagcgtggaaattgaatgggagctgcagaaagagaacagcaagcgctggaacccagagattcagtatacttccaactactacaaatctacaaatgtggactttgctgtcaatactgagggtacttattcagagcctcgccccattggcacccgttacctcacccgtaacctgtaattgcctgttaatcaataaaccggctaattcgtttcagttgaactttggtctctgcgaagggcgaattc

SEQ ID NO: 4775 - protein, 738 aa, Adeno-associated virus
MAADGYLPDWLEDNLSEGIREWWDLKPGAPKPKANQQKQDDGRGLVLPGYKYLGPFNGLDKGEPVNAADAAALEHDKAYDQQLKAGDNPYLRYNHADAEFQERLQEDTSFGGNLGRAVFQAKKRVLEPLGLVEEGAKTAPGKKRPVEPSPQRSPDSSTGIGKTGQQPAKKRLNFGQTGDSESVPDPQPIGEPPAGPSGLGSGTMAAGGGAPMADNNEGADGVGSSSGNWHCDSTWLGDRVITTSTRTWALPTYNNHLYKQISNGTSGGSTNDNTYFGYSTPWGYFDFNRFHCHFSPRDWQRLINNNWGFRPKRLNFKLFNIQVKEVTQNEGTKTIANNLTSTIQVFTDSEYQLPYVLGSAHQGCLPPFPADVFMIPQYGYLTLNNGSQAVGRSSFYCLEYFPSQMLRTGNNFEFSYQFEDVPFHSSYAHSQSLDRLMNPLIDQYLYYLSRTQSTGGTAGTQQLLFSQAGPNNMSAQAKNWLPGPCYRQQRVSTTLSQNNNSNFAWTGATKYHLNGRDSLVNPGVAMATHKDDEERFFPSSGVLMFGKQGAGKDNVDYSSVMLTSEEEIKTTNPVATEQYGVVADNLQQQNAAPIVGAVNSQGALPGMVWQNRDVYLQGPIWAKIPHTDGNFHPSPLMGGFGLKHPPPQILIKNTPVPADPPTTFSQAKLASFITQYSTGQVSVEIEWELQKENSKRWNPEIQYTSNYYKSTNVDFAVNTEGTYSEPRPIGTRYLTRNL

SEQ ID NO: 4776 - DNA, 3084 bp, Adeno-associated virus
gaattcgccctttctacggctgcatcaactggaccaatgagaactttcccttcaacgattgcgtcgacaagatggtgatctggtgggaggagggcaagatgacggccaaggtcgtggagtccgccaaggccattctcggcggcagcaaggtgcgcgtggaccaaaagtgcaagtcgtccgcccagatcgaccccacccccgtgatcgtcacctccaacaccaacatgtgcgccgtgattgacgggaacagcaccaccttcgagcaccagcagccgttgcaggaccggatgttcaagttcgaactcacccgccgtctggagcacgactttggcaaggtgaccaagcaggaagtcaaagagttcttccgctgggcgcaggatcacgtgaccgaggtggcgcatgagttctacgtcagaaagggcggagccagcaaaagacccgcccccgatgacgcggatataagcgagcccaagcgggcctgcccctcagtcgcggatccatcgacgtcagacgcggaaggagctccggtggactttgccgacaggtaccaaaacaaatgttctcgtcacgcgggcatgcttcagatgctgtttccctgcaaaacgtgcgagaaaatgaatcagaatttcaacatttgcttcacgcacggggtcagagactgctcagaatgtttccccggtgcatcagaatctcaaccggtcgtcagaaaaaaaacgtatcagaaactgtgtgccattcatcatctgctggggcgggcacccgagattgcttgctcggcctgcgatctggtcaacgtggacctggacgactgtgtttctgagcaataaatgacttaaaccaggtatggctgccgatggttatcttccagattggcttgaggacaacctctctgagggcattcgcgagtggtgggacctgaaacctggagccccgaaacccaaagccaaccagcaaaagcaggacgacggccggggtctggtgcttcctggctacaagtacctcggacccttcaacggactcgacaagggggagcccgtcaacgcggcggacgcagcggccctcgagcacgacaaggcctacgaccagcagctcaaagcgggtgacaatccgtacctgcggtataaccacgccgacgccgagtttcaggagcgtctgcaagaagatacgtcttttgggggcaacctcgggcgagcagtcttccaggccaagaagcgggttctcgaacctctcggtctggttgaggaaggcgctaagacggctcctggaaagaagagaccggtagagccatcacctcagcgttcccccgactcctccacgggcatcggcaagaaaggccaccagcccgcgagaaagagactgaactttgggcagactggcgactcggagtcagtccccgaccctcaaccaatcggagaaccaccagcaggcccctctggtctgggatctggtacaatggctgcaggcggtggcgctccaatggcagacaataacgaaggcgccgacggagtgggtagttcctcaggaaattggcattgcgattccacatggctgggcgacagagtcatcaccaccagcacccgaacctgggccctgcccacctacaacaaccatctctacaagcaaatctccaacgggacatcgggaggaagcactaacgacaacacctactttggctacagcaccccctgggggtattttgacttcaacagattccactgccacttctcaccacgtgactggcagcgactcatcaacaataactggggattccggcccaagagactcaacttcaagctcttcaacatccaggtcaaggaggtcacgcagaatgaaggcaccaagaccatcgccaataaccttaccagcacgattcaggtgtttacggactcggaataccagctcccgtacgtccccggctctgcgcaccagggctgcctccctccgttcccggcggacgtcttcatgattcctcagtacgggtatctgaccctaaacaatggcagtcaggctgtgggccgttcctccttctactgcctggaatacttcccttctcaaatgctgaggacgggcaacaactttgaattcagctacaccttcgaggacgtgcctttccacagcagctacgcgcacagccagagcctggaccggctgatgaaccctctcatcgaccagtacctgtattacttatccagaactcagtccacaggaggaactcaaggtactcagcaattgttattttctcaagccgggcccgcaaacatgtcggctcaggccaagaactggctacctggaccgtgttaccgtcagcaacgagtttccacgacactgtcgcaaaacaacaacagcaattttgcttggaccggtgccaccaagtatcacctgaatggcagagactccctggttaatcccggcgttgccatggctacccacaaggacgacgaggagcgcttcttcccgtcaagcggagttctaatgtttggcaagcagggggctggaaaagacaatgtggactacagcagcgtgatgctcaccagcgaagaagaaattaaaactactaacccagtggctacagagcagtatggtgtggtggcagacaacctgcagcagaccaacggagctcccattgtgggaactgtcaacagccagggggccttacctggtatggtctggcaaaaccgggacgtgtacctgcagggccccatctgggccaaaattcctcacacggacggcaactttcatccttcgccgctgatgggaggctttggactgaaacacccgcctcctcagatcctggtgaaaaacactcctgttcctgcggatcctccgaccaccttcagccaggccaagctggcttcttttatcacgcagtacagcaccggacaggtcagcgtggaaatcgaatgggagctgcagaaagaaaacagcaagcgctggaacccagagattcagtatacttccaactactacaaatctacaaatgtggactttgctgtcaatactgagggtacttattcagagcctcgccccattggcactcgttatctcacccgtaatctgtaattgcttgttaatcaataaaccggt

SEQ ID NO: 4777 - protein, 738 aa, Adeno-associated virus
MAADGYLPDWLEDNLSEGIREWWDLKPGAPKPKANQQKQDDGRGLVLPGYKYLGPFNGLDKGEPVNAADAAALEHDKAYDQQLKAGDNPYLRYNHADAEFQERLQEDTSFGGNLGRAVFQAKKRVLEPLGLVEEGAKTAPGKKRPVEPSPQRSPDSSTGIGKKGHQPARKRLNFGQTGDSESVPDPQPIGEPPAGPSGLGSGTMAAGGGAPMADNNEGADGVGSSSGNWHCDSTWLGDRVITTSTRTWALPTYNNHLYKQISNGTSGGSTNDNTYFGYSTPWGYFDFNRFHCHFSPRDWQRLINNNWGFRPKRLNFKLFNIQVKEVTQNEGTKTIANNLTSTIQVFTDSEYQLPYVPGSAHQGCLPPFPADVFMIPQYGYLTLNNGSQAVGRSSFYCLEYFPSQMLRTGNNFEFSYTFEDVPFHSSYAHSQSLDRLMNPLIDQYLYYLSRTQSTGGTQGTQQLLFSQAGPANMSAQAKNWLPGPCYRQQRVSTTLSQNNNSNFAWTGATKYHLNGRDSLVNPGVAMATHKDDEERFFPSSGVLMFGKQGAGKDNVDYSSVMLTSEEEIKTTNPVATEQYGVVADNLQQTNGAPIVGTVNSQGALPGMVWQNRDVYLQGPIWAKIPHTDGNFHPSPLMGGFGLKHPPPQILVKNTPVPADPPTTFSQAKLASFITQYSTGQVSVEIEWELQKENSKRWNPEIQYTSNYYKSTNVDFAVNTEGTYSEPRPIGTRYLTRNL

SEQ ID NO: 4778 - DNA, 3123 bp, Adeno-associated virus
gaattcgcccttggctgcgtcaactggaccaatgagaactttcccttcaacgattgcgtcgacaagatggtgatctggtgggaggagggcaagatgacggccaaggtcgtggagtccgccaaggccattctcggcggcagcaaggtgcgcgtggaccaaaagtgcaagtcgtccgcccagatcgaccccacccccgtgatcgtcacctccaacaccaacatgtgcgccgtgattgacgggaacagcaccaccttcgagcaccagcagccgttgcaggaccggatgttcaagttcgaactcacccgccgtctggagcacgactttggcaaggtgaccaagcaggaagtcaaagagttcttccgctgggcgcaggatcacgtgaccgaggtggcgcatgagttctacgtcagaaagggcggagccagcaaaagacccgcccccgatgacgcggatataagcgagcccaagcgggcctgcccctcagtcgcggatccatcgacgtcagacgcggaaggagctccggtggactttgccgacaggtaccaaaacaaatgttctcgtcacgcgggcatgctccagatgctgtttccctgcaaaacgtgcgagagaatgaatcagaatttcaacatttgcttcacgcacggggtcagagactgctcagaatgtttccccggtgcatcagaatctcaaccggtcgtcagaaaaaaaacgtatcagaaactgtgtgccattcatcatctgctggggcgggcacccgagattgcttgctcggcctgcgatctggtcaacgtggacctggacgactgtgtttctgagcaataaatgacttaaaccaggtatggctgccgatggttatcttccagattggcttgaggacaacctctctgagggcattcgcgagtggtgggacctgaaacctggagccccgaaacccaaagccaaccagcaaaagcaggacgacggccggggtctggtgcttcctggctacaagtacctcggacccttcaacggactcgacaagggggagcccgtcaacgcggcggacgcagcggccctcgagcacgacaaggcctacgaccagcagctcaaagcgggtgacaatccgtacctgcggtataaccacgccgacgccgagtttcaggagcgtctgcaagaagatacgtcttttgggggcaacctcgggcgagcagtcttccaggccaagaagcgggttctcgaacctctcggtctggttgaggaaggcgctaagacggctcctggaaagaagagaccggtagagccatcacctcagcgttcccccgactcctccacgggcatcggcaagaaaggccaccagcccgcgagaaagagactgaactttgggcagactggcgactcggagtcagtccccgaccctcaaccaatcggagaaccaccagcaggcccctctggtctgggatctggtacaatggctgcaggcggtggcgctccaatggcagacaataacgaaggcgccgacggagtgggtagttcctcaggaaattggcattgcgattccacatggctgggcgacagagtcatcaccaccagcacccgaacctgggccctgcccacctacaacaaccatctctacaagcaaatctccaacgggacatcgggaggaagcactaacgacaacacctactttggctacagcaccccctgggggtattttgacttcaacagattccactgccacttctcaccacgtgactggcagcgactcatcaacaataactggggattccggcccaagagactcaacttcaagctcttcaacatccaggtcaaggaggtcacgcagaatgaaggcaccaagaccatcgccaataaccttaccagcacgattcaggtgtttacggactcggaataccagctcccgtacgtcctcggctctgcgcaccagggctgcctccctccgttcccggcggacgtcttcatgattcctcagtacgggtatctgaccctaaacaatggcagtcaggctgtgggccgttcctccttctactgcctggaatacttcccttctcaaatgctgaggacgggcaacaactttgaattcagctacaccttcgaggacgtgcctttccacagcagctacgcgcacagccagagcctggaccggctgatgaaccctctcatcgaccagtacctgtattacttatccagaactcagtccacaggaggaactcaaggtactcagcaattgttattttctcaagccgggcccgcaaacatgtcggctcaggccaagaactggctacctggaccgtgttaccgtcagcaacgagtttccacgacactgtcgcaaaacaacaacagcaattttgcttggaccggtgccaccaagtatcacctgaatggcagagactccctggttaatcccggcgttgccatggctacccacaaggacgacgaggagcgcttcttcccgtcaagcggagttctaatgtttggcaagcagggggctggaaaagacaatgtggactacagcagcgtgatgctcaccagcgaagaagaaattaaaactactaacccagtggctacagagcagtatggtgtggtggcagacaacctgcagcagaccaacggagctcccattgtgggaactgtcaacagccagggggccttacctggtatggtctggcaaaaccgggacgtgtacctgcagggccccatctgggccaaaattcctcacacggacggcaactttcatccttcgccgctgatgggaggctttggactgaaacacccgcctcctcagatcctggtgaaaaacactcctgttcctgcggatcctccgaccaccttcagccaggccaagctggcttcttttatcacgcagtacagcaccggacaggtcagcgtggaaatcgaatgggagctgcagaaagaaaacagcaagcgctggaacccagagattcagtatacttccaactactacaaatctacaaatgtggactttgctgtcaatactgagggtacttattcagagcctcgccccattggcactcgttatctcacccgtaatctgtaattgcttgttaatcaataaaccggttaattcgtttcagttgaactttggtctctgcgaagggcgaattc

SEQ ID NO: 4779 - protein, 738 aa, Adeno-associated virus
MAADGYLPDWLEDNLSEGIREWWDLKPGAPKPKANQQKQDDGRGLVLPGYKYLGPFNGLDKGEPVNAADAAALEHDKAYDQQLKAGDNPYLRYNHADAEFQERLQEDTSFGGNLGRAVFQAKKRVLEPLGLVEEGAKTAPGKKRPVEPSPQRSPDSSTGIGKKGHQPARKRLNFGQTGDSESVPDPQPIGEPPAGPSGLGSGTMAAGGGAPMADNNEGADGVGSSSGNWHCDSTWLGDRVITTSTRTWALPTYNNHLYKQISNGTSGGSTNDNTYFGYSTPWGYFDFNRFHCHFSPRDWQRLINNNWGFRPKRLNFKLFNIQVKEVTQNEGTKTIANNLTSTIQVFTDSEYQLPYVLGSAHQGCLPPFPADVFMIPQYGYLTLNNGSQAVGRSSFYCLEYFPSQMLRTGNNFEFSYTFEDVPFHSSYAHSQSLDRLMNPLIDQYLYYLSRTQSTGGTQGTQQLLFSQAGPANMSAQAKNWLPGPCYRQQRVSTTLSQNNNSNFAWTGATKYHLNGRDSLVNPGVAMATHKDDEERFFPSSGVLMFGKQGAGKDNVDYSSVMLTSEEEIKTTNPVATEQYGVVADNLQQTNGAPIVGTVNSQGALPGMVWQNRDVYLQGPIWAKIPHTDGNFHPSPLMGGFGLKHPPPQILVKNTPVPADPPTTFSQAKLASFITQYSTGQVSVEIEWELQKENSKRWNPEIQYTSNYYKSTNVDFAVNTEGTYSEPRPIGTRYLTRNL

SEQ ID NO: 4780 - DNA, 3122 bp, Adeno-associated virus
gaattcgccctttctacggctgcgtcaactggaccaatgagaactttcccttcaacgattgcgtcgacaagatggtgatctggtgggaggagggcaagatgacggccaaggtcgtggagtccgccaaggccattctcggcggcagcaaggtgcgtgtggaccaaaagtgcaagtcttccgcccagatcgatcccacccccgtgatcgtcacctccaacaccaacatgtgcgccgtgattgacgggaacagcgccaccttcgagcaccagcagccgttgcaggaccggatgttcaaatttgaactcacccgccgtctggagcatgactttggcaaggtgacgaagcaggaagtcaaagagttcttccgctgggcgcaggatcacgtgaccgaggtggcgcatgagttccacgtcagaaagggtggagccaacaagagacccgcccccgatgacgcggatataagcgagcccaagcgggcctgcccctcagtcgcggatccatcgacgtcagacgcggaaggagctccggtggactttgccgacaggtaccaaaacaaatgttctcgtcacgcgggcatgcttcagatgctgtttccctgcaagacatgcgagagaatgaatcagaatttcaacatttgcttcacgcacgggaccagagactgttcagaatgtttccccggcgtgtcagaatctcaaccggtcgtcagaaagaggacgtatcggaaactctgtgcgattcatcatctgctggggcgggctcccgagattgcttgctcggcctgcgatctggtcaacgtggacctggatgactgtgtttctgagcaataaatgacttaaaccaggtatggctgccgatggttatcttccagattggctcgaggacaacctctctgagggcattcgcgagtggtgggacttgaaacctggagccccgaaacccaaagccaaccagcaaaagcaggacgacggccggggtctggtgcttcctggctacaagtacctcggacccttcaacggactcgacaagggggagcccgtcaacgcggcggacgcagcggccctcgagcacgacaaagcctacgaccagcagctcaaagcgggtgacaatccgtacctgcggtataatcacgccgacgccgagtttcaggagcgtctgcaagaagatacgtcttttgggggcaacctcgggcgagcagtcttccaggccaagaagcgggttctcgaacctctcggtctggttgaggaaggcgctaagacggctcctggaaagaagagactggtagagcagtcgccacaagagccagactcctcctcgggcatcggcaagacaggccagcagcccgctaaaaagagactcaattttggtcagactggcgactcagagtcagtccccgacccacaacctctcggagaacctccagcagccccctcaggtctgggacctaatacaatggcttcaggcggtggcgctccaatggcagacaataacgaaggcgccgacggagtgggtaattcctcgggaaattggcattgcgattccacatggctgggggacagagtcatcaccaccagcacccgaacctgggccctgcccacctacaacaaccacctctacaagcaaatctccaacggcacctcgggaggaagcaccaacgacaacacctattttggctacagcaccccctgggggtattttgacttcaacagattccactgtcacttttcaccacgtgactggcaacgactcatcaacaacaattggggattccggcccaaaagactcaacttcaagctgttcaacatccaggtcaaggaagtcacgacgaacgaaggcaccaagaccatcgccaataatctcaccagcaccgtgcaggtctttacggactcggagtaccagttaccgtacgtgctaggatccgctcaccagggatgtctgcctccgttcccggcggacgtcttcacggttcctcagtacggctatttaactttaaacaatggaagccaagccctgggacgttcctccttctactgtctggagtatttcccatcgcagatgctgagaaccggcaacaactttcagttcagctacaccttcgaggacgtgcctttccacagcagctacgcgcacagccagagcctggacaggctgatgaatcccctcatcgaccagtacctgtactacctggtcagaacgcaaacgactggaactggagggacgcagactctggcattcagccaagcgggtcctagctcaatggccaaccaggctagaaattgggtgcccggaccttgctaccggcagcagcgcgtctccacgacaaccaaccagaacaacaacagcaactttgcctggacgggagctgccaagtttaagctgaacggccgagactctctaatgaatccgggcgtggcaatggcttcccacaaggatgacgacgaccgcttcttcccttcgagcggggtcctgatttttggcaagcaaggagccgggaacgatggagtggattacagccaagtgctgattacagatgaggaagaaatcaaggctaccaaccccgtggccacagaagaatatggagcagtggccatcaacaaccaggccgccaatacgcaggcgcagaccggactcgtgcacaaccagggggtgattcccggcatggtgtggcagaatagagacgtgtacctgcagggtcccatctgggccaaaattcctcacacggacggcaactttcacccgtctcccctgatgggcggctttggactgaagcacccgcctcctcaaattctcatcaagaacacaccggttccagcggacccgccgcttaccttcaaccaggccaagctgaactctttcatcacgcagtacagcaccggacaggtcagcgtggaaatcgagtgggagctgcagaaagaaaacagcaaacgctggaatccagagattcaatacacttccaactactacaaatctacaaatgtggactttgctgtcaacacggaaggagtttatagcgagcctcgccccattggcacccgttacctcacccgcaacctgtaattacatgttaatcaataaaccggttaattcgtttcagttgaactttggtctctgcgaagggcgaattc

SEQ ID NO: 4781 - protein, 736 aa, Adeno-associated virus
MAADGYLPDWLEDNLSEGIREWWDLKPGAPKPKANQQKQDDGRGLVLPGYKYLGPFNGLDKGEPVNAADAAALEHDKAYDQQLKAGDNPYLRYNHADAEFQERLQEDTSFGGNLGRAVFQAKKRVLEPLGLVEEGAKTAPGKKRLVEQSPQEPDSSSGIGKTGQQPAKKRLNFGQTGDSESVPDPQPLGEPPAAPSGLGPNTMASGGGAPMADNNEGADGVGNSSGNWHCDSTWLGDRVITTSTRTWALPTYNNHLYKQISNGTSGGSTNDNTYFGYSTPWGYFDFNRFHCHFSPRDWQRLINNNWGFRPKRLNFKLFNIQVKEVTTNEGTKTIANNLTSTVQVFTDSEYQLPYVLGSAHQGCLPPFPADVFTVPQYGYLTLNNGSQALGRSSFYCLEYFPSQMLRTGNNFQFSYTFEDVPFHSSYAHSQSLDRLMNPLIDQYLYYLVRTQTTGTGGTQTLAFSQAGPSSMANQARNWVPGPCYRQQRVSTTTNQNNNSNFAWTGAAKFKLNGRDSLMNPGVAMASHKDDDDRFFPSSGVLIFGKQGAGNDGVDYSQVLITDEEEIKATNPVATEEYGAVAINNQAANTQAQTGLVHNQGVIPGMVWQNRDVYLQGPIWAKIPHTDGNFHPSPLMGGFGLKHPPPQILIKNTPVPADPPLTFNQAKLNSFITQYSTGQVSVEIEWELQKENSKRWNPEIQYTSNYYKSTNVDFAVNTEGVYSEPRPIGTRYLTRNL

SEQ ID NO: 4782 - DNA, 3117 bp, Adeno-associated virus
gaattcgcccttggctgcgtcaactggaccaatgagaactttcccttcaacgattgcgtcgacaagatggtgatctggtgggaggagggcaagatgacggccaaggtcgtggagtccgccaaggccattctcggcggcagcaaggtgcgtgtggaccaaaagtgcaagtcttccgcccagatcgatcccacccccgtgatcgtcacctccaacaccaacatgtgcgccgtgattgacgggaacagcaccaccttcgagcaccagcagccgttgcaggaccggatgttcaaatttgaactcacccgccgtctggagcatgactttggcaaggtgacgaagcaggaagtcaaagagttcttccgctgggcgcaggatcacgtgaccgaggtggcgcatgagttccacgtcagaaagggtggagccaacaagagacccgcccccgatgacgcggatataagcgagcccaagcgggcctgcccctcagtcgcggatccatcgacgtcagacgcggaaggagctccggtggactttgccgacaggtaccaaaacaaatgttctcgtcacgcgggcatgcttcagatgctgtttccctgcaagacatgcgagagaatgaatcagaatttcaacatttgcttcacgcacgggaccagagactgttcagaatgtttccccggcgtgtcagaatctcaaccggtcgtcagaaagaggacgtatcggaaactctgtgcgattcatcatctgctggggcgggctcccgagattgcttgctcggcctgcgatctggtcaacgtggacctggatgactgtgtttctgagcaataaatgacttaaaccaggtatggctgccgatggttatcttccagattggctcgaggacaacctctctgagggcattcgcgagtggtgggacttgaaacctggagccccgaaacccaaagccaaccagcaaaagcaggacgacggccggggtctggtgcttcctggctacaagtacctcggacccttcaacggactcgacaagggggagcccgtcaacgcggcggacgcagcggccctcgagcacgacaaagcctacgaccagcagctcaaagcgggtgacaatccgtacctgcggtataatcacgccgacgccgagtttcaggagcgtctgcaagaagatacgtcttttgggggcaacctcgggcgagcagtcttccaggccaagaagcgggttctcgaacctctcggtctggttgaggaaggcgctaagacggctcctggaaagaagagaccggtagagcagtcgccacaagagccagactcctcctcgggcatcggcaagacaggccagcagcccgctaaaaagagactcaattttggtcagactggcgactcagagtcagtccccgacccacaacctctcggagaacctccagcagccccctcaggtctgggacctaatacaatggcttcaggcggtggcgctccaatggcagacaataacgaaggcgccgacggagtgggtaattcctcgggaaattggcattgcgattccacatggctgggggacagagtcatcaccaccagcacccgaacctgggccctgcccacctacaacaaccacctctacaagcaaatctccaacggcacctcgggaggaagcaccaacgacaacacctattttggctacagcaccccctgggggtattttgacttcaacagattccactgtcacttttcaccacgtgactggcaacgactcatcaacaacaattggggattccggcccaaaagactcaacttcaagctgttcaacatccaggtcaaggaagtcacgacgaacgaaggcaccaagaccatcgccaataatctcaccagcaccgtgcgggtctttacggactcggagtaccagttaccgtacgtgctaggatccgctcaccagggatgtctgcctccgttcccggcggacgtcttcatggttcctcagtacggctatttaactttaaacaatggaagccaagccctgggacgttcctccttctactgtctggagtatttcccatcgcagatgctgagaaccggcaacaactttcagttcagctacaccttcgaggacgtgcctttccacagcagctacgcgcacagccagagcctggacaggctgatgaatcccctcatcgaccagtacctgtactacctggtcagaacgcaaacgactggaactggagggacgcagactctggcattcagccaagcgggtcctagctcaatggccaaccaggctagaaattgggtgcccggaccttgctaccggcagcagcgcgtctccacgacaaccaaccagagcaacaacagcaactttgcctggacgggagctgccaagtttaagctgaacggccgagactctctaatgaatccgggcgtggcaatggcttcccacaaggatgacgacgaccgcttcttcccttcgagcggggtcctgatttttggcaagcaaggagccgggaacgatggagtggattacagccaagtgctgattacagatgaggaagaaatcaaggctaccaaccccgtggccacagaagaatatggagcagtggccatcaacaaccaggccgccaatacgcaggcgcagaccggactcgtgcacaaccagggggtgattcccggcatggtgtggcagaatagagacgtgtacctgcagggtcccatctgggccaaaattcctcacacggacggcaactttcacccgtctcccctgatgggcggctttggactgaagcacccgcctcctcaaattctcatcaagaacacaccggttccagcggacccgccgcttaccttcaaccaggccaagctgaactctttcatcacgcagtacagcaccggacaggtcagcgtggaaatcgagtgggagctgcagaaagaaaacagcaaacgctggaatccagagattcaatacacttccaactactacaaatctacaaatgtggactttgctgtcaacacggaaggagtttatagcgagcctcgccccattggcacccgttacctcacccgcaacctgtaattacatgttaatcaataaaccggttaattcgtttcagttgaactttggtctctgcgaagggcgaattc

SEQ ID NO: 4783 - protein, 736 aa, Adeno-associated virus
MAADGYLPDWLEDNLSEGIREWWDLKPGAPKPKANQQKQDDGRGLVLPGYKYLGPFNGLDKGEPVNAADAAALEHDKAYDQQLKAGDNPYLRYNHADAEFQERLQEDTSFGGNLGRAVFQAKKRVLEPLGLVEEGAKTAPGKKRPVEQSPQEPDSSSGIGKTGQQPAKKRLNFGQTGDSESVPDPQPLGEPPAAPSGLGPNTMASGGGAPMADNNEGADGVGNSSGNWHCDSTWLGDRVITTSTRTWALPTYNNHLYKQISNGTSGGSTNDNTYFGYSTPWGYFDFNRFHCHFSPRDWQRLINNNWGFRPKRLNFKLFNIQVKEVTTNEGTKTIANNLTSTVRVFTDSEYQLPYVLGSAHQGCLPPFPADVFMVPQYGYLTLNNGSQALGRSSFYCLEYFPSQMLRTGNNFQFSYTFEDVPFHSSYAHSQSLDRLMNPLIDQYLYYLVRTQTTGTGGTQTLAFSQAGPSSMANQARNWVPGPCYRQQRVSTTTNQSNNSNFAWTGAAKFKLNGRDSLMNPGVAMASHKDDDDRFFPSSGVLIFGKQGAGNDGVDYSQVLITDEEEIKATNPVATEEYGAVAINNQAANTQAQTGLVHNQGVIPGMVWQNRDVYLQGPIWAKIPHTDGNFHPSPLMGGFGLKHPPPQILIKNTPVPADPPLTFNQAKLNSFITQYSTGQVSVEIEWELQKENSKRWNPEIQYTSNYYKSTNVDFAVNTEGVYSEPRPIGTRYLTRNL

SEQ ID NO: 4784 - DNA, 3121 bp, Adeno-associated virus
gaattcgcccttctacggctgcgtcaactggaccaatgagaactttcccttcaacgattgcgtcgacaagatggtgatctggtgggaggagggcaagatgacggccaaggtcgtggagtccgccaaggccattctcggcggcagcaaggtgcgtgtggaccaaaagtgcaagtcttccgcccagatcgatcccacccccgtgatcgtcacctccaacaccaacatgtgcgccgtgattgacgggaacagcaccaccttcgagcaccagcagccgttgcaggaccggatgttcaaatttgaactcacccgccgtctggagcatgactttggcaaggtgacgaagcaggaagtcaaagagttcttccgctgggcgcaggatcacgtgaccgaggtggcgcatgagttccacgtcagaaagggtggcgccaacaagagacccgcccccgatgacgcggatataagcgagcccaagcgggcctgcccctcagtcgcggatccatcgacgtcagacgcggaaggagctccggtggactttgccgacaggtaccaaaacaaatgttctcgtcacgcgggcatgcttcagatgctgtttccctgcaagacatgcgagagaatgaatcagaatttcaacatttgcttcacgcacgggaccagagactgttcagaatgtttccccggcgtgtcagaatctcaaccggtcgtcagaaagaggacgtatcggaaactctgtgcgattcatcatctgctggggcgggctcccgagattgcttgctcggcctgcgatctggtcaacgtggacctggatgactgtgtttctgagcaataaatgacttaaaccaggtatggctgccgatggttatcttccagattggctcgaggacaacctctctgagggcattcgcgagtggtgggacttgaaacctggagccccgaaacccaaagccaaccagcaaaagcaggacgacggccggggtctggtgcttcctggctacaagtacctcggacccttcaacggactcgacaagggggagcccgtcaacgcggcggacgcagcggccctcgagcacgacaaagcctacgaccagcagctcaaagcgggtgacaatccgtacctgcggtataatcacgccgacgccgagtttcaggagcgtctgcaagaagatacgtcctttgggggcaacctcgggcgagcagtcttccaggccaagaagcgggttctcgaacctctcggtctggttgaggaaggcgctaagacggctcctggaaagaagagaccggtagagcagtcgccacaagagccagactcctcctcgggcatcggcaagacaggccagcagcccgctaaaaagagactcaattttggtcagactggcgactcagagtcagtccccgacccacaacctctcggagaacctccagcagccccctcaggtctgggacctaatacaatggcttcaggcggtggcgctccaatggcagacaataacgaaggcgccgacggagtgggtaattcctcgggaaattggcattgcgattccacatggctgggggacagagtcatcaccaccagcacccgaacctgggccctgcccacctacaacaaccacctctacaagcaaatctccaacggcacctcgggaggaagcaccaacgacaacacctattttggctacagcaccccctgggggtattttgacttcaacagattccactgtcacttttcaccacgtgactggcaacgactcatcaacaacaattggggattccggcccaaaagactcaacttcaagctgttcaacatccaggtcaaggaagtcacgacgaacgaaggcaccaagaccatcgccaataatctcaccagcaccgtgcaggtctttacggacttggagtaccagttaccgtacgtgctaggatccgctcaccagggatgtctgcctccgttcccggcggacgtcttcatggttcctcagtacggctatttaactttaaacaatggaagccaagccctgggacgttcctccttctactgtctggagtatttcccatcgcagatgccgagaaccggcaacaactttcagttcagctacaccttcgaggacgtgcctttccacagcagctacgcgcacagccagagcctggacaggctgatgaatcccctcatcgaccagtacctgtactacctggtcagaacgcaaacgactggaactggagggacgcagactctggcattcagccaagcgggtcctagctcaatggccaaccaggctagaaattgggtgcccggaccttgctaccggcagcagcgcgtctccacgacaaccaaccagaacaacaacagcaactttgcctggacgggagctgccaagtttaagctgaacggccgagactctctaatgaatccgggcgtggcaatggcttcccacaaggatgacgacgaccgcttcttcccttcgagcggggtcctgatttttggcaagcaaggagccgggaacgatggagtggattacagccaagtgctgattacagatgaggaagaaatcaaggctaccaaccccgtggccacagaagaatatggagcagtggccatcaacaaccaggccgccaatacgcaggcgcagaccggactcgtgcacaaccagggggtgattcccggcatggtgtggcagaatagagacgtgtacctgcagggtcccatctgggccaaaattcctcacacggacggcaactttcacccgtctcccctgatgggcggctttggactgaagcacccgcctcctcaaattctcatcaagaacacaccggttccagcggacccgccgcttaccttcaaccaggccaagctgaactctttcatcacgcagtacagcaccggacaggtcagcgtggaaatcgagtgggagctgcagaaagaaaacagcaaacgctggaatccagagattcaatacacttccaactactacaaatctacaaatgtggactttgctgtcaacacggaaggagtttatagcgagcctcgccccattggcacccgttacctcacccgcaacctgtaattacatgttaatcaataaaccggttaattcgtttcagttgaactttggtctctgcgaagggcgaattc

SEQ ID NO: 4785 - protein, 736 aa, Adeno-associated virus
MAADGYLPDWLEDNLSEGIREWWDLKPGAPKPKANQQKQDDGRGLVLPGYKYLGPFNGLDKGEPVNAADAAALEHDKAYDQQLKAGDNPYLRYNHADAEFQERLQEDTSFGGNLGRAVFQAKKRVLEPLGLVEEGAKTAPGKKRPVEQSPQEPDSSSGIGKTGQQPAKKRLNFGQTGDSESVPDPQPLGEPPAAPSGLGPNTMASGGGAPMADNNEGADGVGNSSGNWHCDSTWLGDRVITTSTRTWALPTYNNHLYKQISNGTSGGSTNDNTYFGYSTPWGYFDFNRFHCHFSPRDWQRLINNNWGFRPKRLNFKLFNIQVKEVTTNEGTKTIANNLTSTVQVFTDLEYQLPYVLGSAHQGCLPPFPADVFMVPQYGYLTLNNGSQALGRSSFYCLEYFPSQMPRTGNNFQFSYTFEDVPFHSSYAHSQSLDRLMNPLIDQYLYYLVRTQTTGTGGTQTLAFSQAGPSSMANQARNWVPGPCYRQQRVSTTTNQNNNSNFAWTGAAKFKLNGRDSLMNPGVAMASHKDDDDRFFPSSGVLIFGKQGAGNDGVDYSQVLITDEEEIKATNPVATEEYGAVAINNQAANTQAQTGLVHNQGVIPGMVWQNRDVYLQGPIWAKIPHTDGNFHPSPLMGGFGLKHPPPQILIKNTPVPADPPLTFNQAKLNSFITQYSTGQVSVEIEWELQKENSKRWNPEIQYTSNYYKSTNVDFAVNTEGVYSEPRPIGTRYLTRNL

SEQ ID NO: 4786 - DNA, 3122 bp, Adeno-associated virus
gaattcgccctttctacggctgcgtcaactggaccaatgagaactttcccttcaacgattgcgtcgacaagatggtgatctggtgggaggagggcaagatgacggccaaggtcgtggagtccgccaaggccattctcggcggcagcaaggtgcgtgtggaccaaaagtgcaagtcttccgcccagatcgatcccacccccgtgatcgtcacctccaacaccaacatgtgcgccgtgattgacgggaacagcaccaccttcgagcaccagcagccgttgcaggaccggatgttcaaatttgaactcacccgccgtctggagcatgactttggcaaggtgacgaagcaggaagtcaaagggttcttccgctgggcgcaggatcacgtgaccgaggtggcgcatgagttccacgtgcgagcccaagcgggcctgcccctcagtcgcggatccatcgacgtcagaccagaaagggtggagccaacaagagacccgcccccgatgacgcggatataagcggaaggagctccggtggactttgccgacaggtaccaaaacaaatgttctcgtcacgcgggcatgcttcagatgctgtttccctgcaagacatgcgagagaatgaatcagaatttcaacatttgcttcacgcacgggaccagagactgttcagaatgtttccccggcgtgtcagaatctcaaccggtcgtcagaaagaggacgtatcggaaactctgtgcgattcatcatctgctggggcgggctcccgagattgcttgctcggcctgcgatctggtcaacgtggacctggatgactgtgtttctgagcaataaatgacttaaaccaggtatggctgccgatggttatcttccagattggctcgaggacaacctctctgagggcattcgcgagtggtgggacttgaaacctggagccccgaaacccaaagccaaccagcaaaagcaggacgacggccggggtctggtgcttcctggctacaagtacctcggacccttcaacggactcgacaagggggagcccgtcaacgcggcggacgcagcggccctcgagcacgacaaagcctacgaccagcagctcaaagcgggtgacaatccgtacctgcggtataatcacgccgacgccgagtttcaggagcgtctgcaagaagatacgtcttttgggggcaacctcgggcgagcagtcttccaggccaagaagcgggttctcgaacctctcggtctggttgaggaaggcgctaagacggctcctggaaagaagagaccggtagagcagtcgccacaagagccagactcctcctcgggcatcggcaagacaggccagcagcccgctaaaaagagactcaattttggtcagactggcgactcagagtcagtccccgacccacaacctctcggagaacctccagcagccccctcaggtctgggacctaatacaatggcttcaggcggtggcgctccaatggcagacaataacgaaggcgccgacggagtgggtaattcctcgggaaattggcattgcgattccacatggctgggggacagagtcatcaccaccagcacccgaacctgggccctgcccacctacaacaaccacctctacaagcaaatctccaacggcacctcgggaggaagcaccaacgacaacacctattttggctacagcaccccctgggggtattttgacttcaacagattccactgtcacttttcaccacgtgactggcaacgactcatcaacaacaattggggattccggcccaaaagactcaacttcaagctgttcaacatccaggtcaaggaagtcacgacgaacgaaggcaccaagaccatcgccaataatctcaccagcaccgtgcaggtctttacggactcggagtaccagttaccgtacgtgctaggatccgctcaccagggatgtctgcctccgttcccggcggacgtcttcatggttcctcagtacggctatttaactttaaacaatggaagccaagccctgggacgttcctccttctactgtctggagtatttcccatcgcagatgctgagaaccggcaacaactttcagttcagctacaccttcgaggacgtgcctttccacagcagctacgcgcacagccagagcctggacaggctgatgaatcccctcatcgaccagtacctgtactacctggtcagaacgcaaacgactggaactggagggacgcagactctggcattcagccaagcgggtcctagctcaatggccaaccaggctagaaattgggtgcccggaccttgctaccggcagcagcgcgtctccacgacaaccaaccagaacaacaacagcaactttgcctggacgggagctgccaagtttaagctgaacggccgagactctctaatgaatccgggcgtggcaatggcttcccacaaggatgacgacgaccgcttcttcccttcgagcggggtcctgatttttggcaagcaaggagccgggaacgatggagtggattacagccaagtgctgattacagatgaggaagaaatcaaggctaccaaccccgtggccacagaagaatatggagcagtggccatcaacaaccaggccgccaatacgcaggcgcagaccggactcgtgcacaaccagggggtgattcccggcatggtgtggcagaatagagacgtgtacctgcagggtcccatctgggccaaaattcctcacacggacggcaactttcacccgtctcccctgatgggcggctttggactgaagcacccgcctcctcaaattctcatcaagaacacaccggttccagcggacccgccgcttaccttcaaccaggccaagctgaactctttcatcacgcagtacagcaccggacaggtcagcgtggaaatcgagtgggagctgcagaaagaaaacagcaaacgctggaatccagagattcaatacacttccaactactacaaatctacaaatgtggactttgctgtcaacacggagggggtttatagcgagcctcgccccattggcacccgttacctcacccgcaacctgtaattacatgttaatcaataaaccggttaattcgtttcagttgaactttggtctctgcgaagggcgaattc

SEQ ID NO: 4787 - protein, 736 aa, Adeno-associated virus
MAADGYLPDWLEDNLSEGIREWWDLKPGAPKPKANQQKQDDGRGLVLPGYKYLGPFNGLDKGEPVNAADAAALEHDKAYDQQLKAGDNPYLRYNHADAEFQERLQEDTSFGGNLGRAVFQAKKRVLEPLGLVEEGAKTAPGKKRPVEQSPQEPDSSSGIGKTGQQPAKKRLNFGQTGDSESVPDPQPLGEPPAAPSGLGPNTMASGGGAPMADNNEGADGVGNSSGNWHCDSTWLGDRVITTSTRTWALPTYNNHLYKQISNGTSGGSTNDNTYFGYSTPWGYFDFNRFHCHFSPRDWQRLINNNWGFRPKRLNFKLFNIQVKEVTTNEGTKTIANNLTSTVQVFTDSEYQLPYVLGSAHQGCLPPFPADVFMVPQYGYLTLNNGSQALGRSSFYCLEYFPSQMLRTGNNFQFSYTFEDVPFHSSYAHSQSLDRLMNPLIDQYLYYLVRTQTTGTGGTQTLAFSQAGPSSMANQARNWVPGPCYRQQRVSTTTNQNNNSNFAWTGAAKFKLNGRDSLMNPGVAMASHKDDDDRFFPSSGVLIFGKQGAGNDGVDYSQVLITDEEEIKATNPVATEEYGAVAINNQAANTQAQTGLVHNQGVIPGMVWQNRDVYLQGPIWAKIPHTDGNFHPSPLMGGFGLKHPPPQILIKNTPVPADPPLTFNQAKLNSFITQYSTGQVSVEIEWELQKENSKRWNPEIQYTSNYYKSTNVDFAVNTEGVYSEPRPIGTRYLTRNL

SEQ ID NO: 4788 - DNA, 2370 bp, Adeno-associated virus
gaattcgccctttctacggctgcgtcaactggaccaatgagaactttcccttcaacgattgcgtcgacaagatggtgatctggtgggaggagggcaagatgacggccaaggtcgtggagtccgccaaggccattctcggcggcagcaaggtgcgcgtggaccaaaagtgcaagtcgtccgcccagatcgaccccacccccgtgatcgtcacctccaacaccaacatgtgcgccgtgattgacgggaacagcaccaccttcgagcaccagcagccgttgcaggaccggatgttcaagttcgaactcacccgccgtctggagcacgactttggcaaggtgaccaagcaggaagtcaaagagttcttccgctgggcgcaggatcacgtgaccgaggtggcgcatgagttctacgtcagaaagggcggagccagcaaaagacccgcccccgatgacgcggatataagcgagcccaagcgggcctgcccctcagtcgcggatccatcgacgtcagacgcggaaggagctccggtggactttgccgacaggtaccaaaacaaatgttctcgtcacgcgggcatgcttcagacgctgtttccctgcaaaacgtgcgagagaatgaatcagaatttcaacatttgcttcacgcacggggtcagagactgctcagaatgtttccccggtgcatcagaatctcaaccggtcgtcagaaaaaaaacgtatcagaaactgtgtgccattcatcatctgctggggcgggcacccgagattgcttgctcggcctgcgatctggtcaacgtggacctggacgactgtgtttctgagcaataaatgacttaaaccaggtatggctgccgatggttatcttccagattggcttgaggacaacctctctgagggcattcgcgagtggtgggacctgaaacctggagccccgaaacccaaagccaaccagcaaaagcaggacgacggccggggtctggtgcttcctggctacaagtacctcggacccttcaacggactcgacaagggggagcccgtcaacgcggcggacgcagcggccctcgagcacgacaaggcctacgaccagcagctcaaagcgggtgacaatccgtacctgcggtataaccacgccgacgccgagtttcaggagcgtctgcaagaagatacgtcttttgggggcaacctcgggcgagcagtcttccaggccaagaagcgggttctcgaacctctcggtctggttgaggaaggcgctaagacggctcctggaaagaagagaccggtagagccatcacctcagcgttcccccgactcctccacgggcatcggcaagaaaggccaccagcccgcgagaaagagactgaactttgggcagactggcgactcggagtcagtccccgaccctcaaccaatcggagaaccaccagcaggcccctctggtctgggatctggtacaatggctgcaggcggtggcgctccaatggcagacaataacgaaggcgccgacggagtgggtagttcctcaggaaattggcattgcgattccacatggctgggcgacagagtcatcaccaccagcacccgaacctgggccctgcccacctacaacaaccatctctacaagcaaatctccaacgggacatcgggaggaagcactaacgacaacacctactttggctacagcaccccctgggggtattttgacttcaacagattccactgccacttctcaccacgtgactggcagcgactcatcaacaataactggggattccggcccaagagactcaacttcaagctcttcaacatccaggtcaaggaggtcacgcagaatgaaggcaccaagaccatcgccaataaccttaccagcacgattcaggtgtttacggactcggaataccagctcccgtacgtcctcggctctgcgcaccagggctgcctccctccgttcccggcggacgtcttcatgattcctcagtacgggtatctgaccctaaacaatggcagtcaggctgtgggccgttcctccttctactgcctggaatacttcccttctcaaatgctgaggacgggcaacaactttgaattcagctacaccttcgaggacgtgcctttccacagcagctacgcgcacagccagagcctggaccggctgatgaaccctctcatcgaccagtacctgtattacttatccagaactcagtccacaggaggaactcaaggtactcagcaattgttattttctcaagccgggcccgcaaacatgtyggctcaggccaagaactggctacctggaccgtgttaccgtcagcaacgagtttccacgacactgtcgcaaaacaacaacagcaattttgctggaccggtgccacca

SEQ ID NO: 4789 - protein, 738 aa, Adeno-associated virus; identical to SEQ ID NO: 4779

SEQ ID NO: 4790 - DNA, 2205 bp, Adeno-associated virus
atgactgacggttaccttccagattggctagaggacaacctctctgaaggcgttcgagagtggtgggcgctgcaacctggagcccctaaacccaaggcaaatcaacaacatcaggacaacgctcggggtcttgtgcttccgggttacaaatacctcggacccggcaacggactcgacaagggggaacccgtcaacgcagcggacgcggcagccctcgagcacgacaaggcctacgaccagcagctcaaggccggtgacaacccctacctcaagtacaaccacgccgacgcggagttccagcagcggcttcagggcgacacatcgtttgggggcaacctcggcagagcagtcttccaggccaaaaagagggttcttgaacctcttggtctggttgagcaagcgggtgagacggctcctggaaagaagagaccgttgattgaatccccccagcagcccgactcctccacgggtatcggcaaaaaaggcaagcagccggctaaaaagaagctcgttttcgaagacgaaactggagcaggcgacggaccccctgagggatcaacttccggagccatgtctgatgacagtgagatgcgtgcagcagctggcggagctgcagtcgagggcggacaaggtgccgatggagtgggtaatgcctcgggtgattggcattgcgattccacctggtctgagggccacgtcacgaccaccagcaccagaacctgggtcttgcccacctacaacaaccacctctacaagcgactcggagagagcctgcagtccaacacctacaacggattctccaccccctggggatactttgacttcaaccgcttccactgccacttctcaccacgtgactggcagcgactcatcaacaacaactggggcatgcgacccaaagccatgcgggtcaaaatcttcaacatccaggtcaaggaggtcacgacgtcgaacggcgagacaacggtggctaataaccttaccagcacggttcagatctttgcggactcgtcgtacgaactgccgtacgtgatggatgcgggtcaagagggcagcctgcctccttttcccaacgacgtctttatggtgccccagtacggctactgtggactggtgaccggcaacacttcgcagcaacagactgacagaaatgccttctactgcctggagtactttccttcgcagatgctgcggactggcaacaactttgaaattacgtacagttttgagaaggtgcctttccactcgatgtacgcgcacagccagagcctggaccggctgatgaaccctctcatcgaccagtacctgtggggactgcaatcgaccaccaccggaaccaccctgaatgccgggactgccaccaccaactttaccaagctgcggcctaccaacttttccaactttaaaaagaactggctgcccgggccttcaatcaagcagcagggcttctcaaagactgccaatcaaaactacaagatccctgccaccgggtcagacagtctcatcaaatacgagacgcacagcactctggacggaagatggagtgccctgacccccggacctccaatggccacggctggacctgcggacagcaagttcagcaacagccagctcatctttgcggggcctaaacagaacggcaacacggccaccgtacccgggactctgatcttcacctctgaggaggagctggcagccaccaacgccaccgatacggacatgtggggcaacctacctggcggtgaccagagcaacagcaacctgccgaccgtggacagactgacagccttgggagccgtgcctggaatggtctggcaaaacagagacatttactaccagggtcccatttgggccaagattcctcataccgatggacactttcacccctcaccgctgattggtgggtttgggctgaaacacccgcctcctcaaatttttatcaagaacaccccggtacctgcgaatcctgcaacgaccttcagctctactccggtaaactccttcattactcagtacagcactggccaggtgtcggtgcagattgactgggagatccagaaggagcggtccaaacgctggaaccccgaggtccagtttacctccaactacggacagcaaaactctctgttgtgggctcccgatgcggctgggaaatacactgagcctagggctatcggtacccgctacctcacccaccacctgtaa

SEQ ID NO: 4791 - protein, 734 aa, Adeno-associated virus
MTDGYLPDWLEDNLSEGVREWWALQPGAPKPKANQQHQDNARGLVLPGYKYLGPGNGLDKGEPVNAADAAALEHDKAYDQQLKAGDNPYLKYNHADAEFQQRLQGDTSFGGNLGRAVFQAKKRVLEPLGLVEQAGETAPGKKRPLIESPQQPDSSTGIGKKGKQPAKKKLVFEDETGAGDGPPEGSTSGAMSDDSEMRAAAGGAAVEGGQGADGVGNASGDWHCDSTWSEGHVTTTSTRTWVLPTYNNHLYKRLGESLQSNTYNGFSTPWGYFDFNRFHCHFSPRDWQRLINNNWGMRPKAMRVKIFNIQVKEVTTSNGETTVANNLTSTVQIFADSSYELPYVMDAGQEGSLPPFPNDVFMVPQYGYCGLVTGNTSQQQTDRNAFYCLEYFPSQMLRTGNNFEITYSFEKVPFHSMYAHSQSLDRLMNPLIDQYLWGLQSTTTGTTLNAGTATTNFTKLRPTNFSNFKKNWLPGPSIKQQGFSKTANQNYKIPATGSDSLIKYETHSTLDGRWSALTPGPPMATAGPADSKFSNSQLIFAGPKQNGNTATVPGTLIFTSEEELAATNATDTDMWGNLPGGDQSNSNLPTVDRLTALGAVPGMVWQNRDIYYQGPIWAKIPHTDGHFHPSPLIGGFGLKHPPPQIFIKNTPVPANPATTFSSTPVNSFITQYSTGQVSVQIDWEIQKERSKRWNPEVQFTSNYGQQNSLLWAPDAAGKYTEPRAIGTRYLTHHL

SEQ ID NO: 4792 - DNA, 3128 bp, Adeno-associated virus
gaattcgccctttctacggctgcgtcaactggaccaatgagaactttcccttcaacgattgcgtcgacaagatgttgatctggtgggaggagggcaagatgacggccaaggtcgtggagtccgccaaggccattctcggcggcagcaaagtgcgcgtggaccaaaagtgcaagccgtccgcccagatcgaccccacccccgtgatcgtcacctccaacaccaacatgtgcgccgtgattgacgggaacagcaccaccttcgagcaccagcagccgttgcgggaccggatgttcaagtttgaactcacccgccgtctggagcacgactttggcaaggtgacaaagcaggaagtcagagagttcttccgctgggcgcaggatcacgtgaccgaggtggcgcacgagttctacgtcagaaagggtggagccaacaagagacccgcccccgatgacgcggataaaagcgagcccaagcgggcctgcccctcagtcgcggatccatcgacgtcagacgcggaaggagctccggtggactttgccgacaggtaccaaaacaaatgttctcgtcacgcgggcatgcttcagatgctgtttccctgcaaaacatgcgagagaatgaatcagaatttcaacatttgcttcacgcacgggaccagagactgttcagaatgtttccccggcgtgtcagaatctcaaccggtcgtcagaaaaaagacgtatcggaaactctgtgcgattcatcatctgctggggcgggcacccgagattgcttgctcggcctgcgatctggtcaacgtggacctagatgactgtgtttctgagcaataaatgacttaaaccaggtatggctgccgatggttatcttccagattggctcgaggacaacctctctgagggcattcgcgagtggtgggacttgaaacctggagccccgaaacccaaagccaaccagcaaaagcaggacgacggccggggtctggtgcttcctggctacaagtacctcggacccttcaacggactcgacaagggggagcccgtcaacgcggcggacgcagcggccctcgagcacgacaaggcctacgaccagcagctcaaagcgggtgacaatccgtacctgcggtataaccacgccgacgccgagtttcaggagcgtctgcaagaagatacgtcttttgggggcaacctcgggcgagcagtcttccaggccaagaagcgggttctcgaacctctcggtctggttgaggaaggcgctaagacggctcctggaaagaagagaccggtagagccatcaccccagcgttctccagactcctctacgggcatcggcaagaaaggccagcagcccgcgaaaaagagactcaactttgggcagactggcgactcagagtcagtgcccgaccctcaaccaatcggagaaccccccgcaggcccctctggtctgggatctggtacaatggctgcaggcggtggcgctccaatggcagacaataacgaaggcgccgacggagtgggtagttcctcaggaaattggcattgcgattccacatggctgggcgacagagtcatcaccaccagcacccgaacctgggccctccccacctacaacaaccacctctacaagcaaatctccaacgggacttcgggaggaagcaccaacgacaacacctacttcggctacagcaccccctgggggtattttgactttaacagattccactgccacttctcaccacgtgactggcagcgactcatcaacaacaactggggattccggcccaagagactcaacttcaagctcttcaacatccaggtcaaggaggtcacgcagaatgaaggcaccaagaccatcgccaataaccttaccagcacgattcaggtctttacggactcggaataccagctcccgtacgtcctcggctctgcgcaccagggctgcctgcctccgttcccggcggacgtcttcatgattcctcagtacgggtacctgactctgaacaatggcagtcaggccgtgggccgttcctccttctactgcctggagtactttccttctcaaatgctgagaacgggcaacaactttgagttcagctaccagtttgaggacgtgccttttcacagcagctacgcgcacagccaaagcctggaccggctgatgaaccccctcatcgaccagtacctgtactacctgtctcggactcagtccacgggaggtaccgcaggaactcagcagttgctattttctcaggccgggcctaataacatgtcggctcaggccaaaaactggctacccgggccctgctaccggcagcaacgcgtctccacgacactgtcgcaaaataacaacagcaactgtaaatcccggtgtcgctatggcaacccacaaggacgacgaagagcgattttgcctggaccggtgccaccaagtatcatctgaatggcagagactctctgttttccgtccagcggagtcttaatgtttgggaaacagggagctggaaaagacaacgtggactatagcagcgttatgctaaccagtgaggaagaaattaaaaccaccaacccagtggccacggaacagtacggcgtggtggccgataacctgcaacagcaaaacgccgctcctattgtaggggccgtcaacagtcaaggagccttacctggcatggtctggcagaaccgggacgtgtacctgcagggtcctatctgggccaagattcctcacacggacggaaactttcatccctcgccgctgatgggaggctttggactgaaacacccgcctcctcagatcctgattaagaatacacctgttcccgcggatcctccaactaccttcagtcaagctaagctggcgtcgttcatcacgcagtacagcaccggacaggtcagcgtggaaattgaatgggagctgcagaaagaaaacagcaaacgctggaacccagagattcaatacacttccaactactacaaatctacaaatgtggacttcgctgttaacacagatggcacttattctgagcctcgccccattggcacccgttacctcacccgtaatctgtaattgctcgttaatcaataaaccggttgattcgtttcagttgaactttggtctctgcgaagggcgaattc

SEQ ID NO: 4793 - protein, 738 aa, Adeno-associated virus
MAADGYLPDWLEDNLSEGIREWWDLKPGAPKPKANQQKQDDGRGLVLPGYKYLGPFNGLDKGEPVNAADAAALEHDKAYDQQLKAGDNPYLRYNHADAEFQERLQEDTSFGGNLGRAVFQAKKRVLEPLGLVEEGAKTAPGKKRPVEPSPQRSPDSSTGIGKKGQQPAKKRLNFGQTGDSESVPDPQPIGEPPAGPSGLGSGTMAAGGGAPMADNNEGADGVGSSSGNWHCDSTWLGDRVITTSTRTWALPTYNNHLYKQISNGTSGGSTNDNTYFGYSTPWGYFDFNRFHCHFSPRDWQRLINNNWGFRPKRLNFKLFNIQVKEVTQNEGTKTIANNLTSTIQVFTDSEYQLPYVLGSAHQGCLPPFPADVFMIPQYGYLTLNNGSQAVGRSSFYCLEYFPSQMLRTGNNFEFSYQFEDVPFHSSYAHSQSLDRLMNPLIDQYLYYLSRTQSTGGTAGTQQLLFSQAGPNNMSAQAKNWLPGPCYRQQRVSTTLSQNNNSNFAWTGATKYHLNGRDSLVNPGVAMATHKDDEERFFPSSGVLMFGKQGAGKDNVDYSSVMLTSEEEIKTTNPVATEQYGVVADNLQQQNAAPIVGAVNSQGALPGMVWQNRDVYLQGPIWAKIPHTDGNFHPSPLMGGFGLKHPPPQILIKNTPVPADPPTTFSQAKLASFITQYSTGQVSVEIEWELQKENSKRWNPEIQYTSNYYKSTNVDFAVNTDGTYSEPRPIGTRYLTRNL

SEQ ID NO: 4794 - DNA, 3129 bp, Adeno-associated virus
gaattcgccctttctacggctgcgtcaactggaccaatgagaactttcccttcaacgattgcgtcgacaagatggtgatctggtgggaggagggcaagatgacggccaaggtcgtggagtccgccaaggccattctcggcggcagcaaagtgcgcgtggaccaaaagtgcaagtcgtccgcccagatcgaccccacccccgtgatcgtcacctccaacaccaacatgtgcgccgtgattgacgggaacagcaccaccttcgagcaccagcagccgttgcaggaccggatgttcaagtttgaactcacccgccgtctggagcacgactttggcaaggtgacaaagcaggaagtcagagagttcttccgctgggcgcaggatcacgtgaccgaggtggcgcacgagttctacgtcagaaagggtggagccaacaagagacccgcccccgatgacgcggataaaagcgagcccaagcgggcctgcccctcagtcgcggatccatcgacgtcagacgcggaaggagctccggtggactttgccgacaggtaccaaaacaaatgttctcgtcacgcgggcatgcttcagatgctgtttccctgcaaaacatgcgagagaatgaatcagaatttcaacatttgcttcacgcacgggaccagagactgttcagaatgtttccccggcgtgtcagaatctcaaccggtcgtcagaaaaaagacgtatcggaaactctgtgcgattcatcatctgctgggggcgggcacccgagattgcttgctcggcctgcgatctggtcaacgtggacctagatgactgtgtttctgagcaataaatgacttaaaccaggtatggctgccgatggttatcttccagattggctcgaggacaacctctctgagggcattcgcgagtggtgggacttgaaacctggagccccgaaacccaaagccaaccagcaaaagcaggacgacggccggggtctggtgcttcctggctacaagtacctcggacccttcaacggactcgacaagggggagcccgtcaacgcggcggacgcagcggccctcgagcacgacaaggcctacgaccagcagctcaaagcgggtgacaatccgtacctgcggtataaccacgccgacgccgagtttcaggagcgtctgcaagaagatacgtcttttgggggcaacctcgggcgagcagtcttccaggccaagaagcgggttctcgaacctctcggtctggttgaggaaggcgctaagacggctcctggaaagaagagaccggtagagccatcaccccagcgttctccagactcctctacgggcatcggcaagaaaggccagcagcccgcgaaaaagagactcaactttgggcagactggcgactcagagtcagtgcccgaccctcaaccaatcggagaaccccccgcaggcccctctggtctgggatctggtacaatggctgcaggcggtggcgctccaatggcagacaataacgaaggcgccgacggagtgggtagttcctcaggaaattggcattgcgattccacatggctgggcgacagagtcatcaccaccagcacccgaacctgggccctccccacctacaacaaccacctctacaagcaaatctccaacgggacttcgggaggaagcaccaacgacaacacctacttcggctacagcaccccctgggggtattttgactttaacagattccactgccacttctcaccacgtgactggcagcgactcatcaacaacaactggggattccggcccaagagactcaacttcaagctcttcaacatccaggtcaaggaggtcacgcagaatgaaggcaccaagaccatcgccaataaccttaccagcacgattcaggtctttacggactcggaataccagctcccgtacgtcctcggctctgcgcaccagggctgcctgcctccgttcccggcggacgtcttcatgattcctcagtacgggtacctgactctgaacaatggcagtcaggccgtgggccgttcctccttctactgcctggagtactttccttctcaaatgctgagaacgggcaacaactttgagttcagctaccagtttgaggacgtgccttttcacagcagctacgcgcacagccaaagcctggaccggctgatgaaccccctcatcgaccagtacctgtactacctgtctcggactcagtccacgggaggtaccgcaggaactcagcagttgctattttctcaggccgggcctaataacatgtcggctcaggccaaaaactggctacccgggccctgctaccggcagcaacgcgtctccacgacactgtcgcaaaataacaacagcaactttgcctggaccggtgccaccaagtatcatctgaatggcagagactctctggtaaatcccggtgtcgctatggcaacccacaaggacgacgaagagcgattttttccgtccagcggagtcttaatgtttgggaaacagggagctggaaaagacaacgtggactatagcagcgttatgctaaccagtgaggaagaaattaaaaccaccaacccagtggccacagaacagtacggcgtggtggccgataacctgcaacagcaaaacgccgctcctattgtaggggccgtcaacagtcaaggagccttacctggcatggtctggcagaaccgggacgtgtacctgcagggtcctatctgggccaagattcctcacacggacggaaactttcatccctcgccgctgatgggaggctttggactgaaacacccgcctcctcagatcctgattaagaatacacctgttcccgcggatcctccaactaccttcagtcaagctaagctggcgtcgttcatcacgcagtacagcaccggacaggtcagcgtggaaattgaatgggagctgcagaaagaaaacagcaaacgctggaacccagagattcaatacacttccaactactacaaatctacaaatgtggactttgctgttaacacagatggcacttattctgagcctcgccccatcggcacccgttacctcacccgtaatctgtaattgcttgttaatcaataaaccggttgattcgtttcagttgaactttggtctctgcgaagggcgaattc

SEQ ID NO: 4795 - DNA, 3128 bp, Adeno-associated virus
gaattcgccctttctacggctgcgtcaactggaccaatgagaactttcccttcaacgattgcgtcgacaagatggtgatctggtgggaggagggcaagatgacggccaaggtcgtggagtccgccaaggccattctcggcggcagcaaagtgcgcgtggaccaaaagtgcaagtcgtccgcccagatcgaccccacccccgtgatcgtcacctccaacaccaacatgtgcgccgtgattgacgggaacagcaccaccttcgagcaccagcagccgttgcaggaccggatgttcaagtttgaactcacccgccgtctggagcacgactttggcaaggtgacaaagcaggaagtcagagagttcttccgctgggcgcaggatcacgtgaccgaggtggcgcacgagttctacgtcagaaagggtggagccaacaagagacccgcccccgatgacgcggataaaagcgagcccaagcgggcctgcccctcagtcgcggatccatcgacgtcagacgcggaaggagctccggtggactttgccgacaggtaccaaaacaaatgttctcgtcacgcgggcatgcttcagatgctgtttccctgcaaaacatgcgagagaatgaatcagaatttcaacatttgcttcacgcacgggaccagagactgttcagaatgtttccccggcgtgtcagaatctcaaccggttgtcagaaaaaagacgtatcggaaactctgtgcgattcatcatctgctggggcgggcacccgagattgcttgctcggcctgcgatctggtcaacgtggacctagatgactgtgtttctgagcaataaatgacttaaaccaggtatggctgccgatggttatcttccagattggctcgaggacaacctctctgagggcattcgcgagtggtgggacttgaaacctggagccccgaaacccaaagccaaccagcaaaagcaggacgacggccggggtctggtgcttcctggctacaagtacctcggacccttcaacggactcgacaagggggagcccgtcaacgcggcggacgcagcggccctcgagcacgacaaggcctacgaccagcagctcaaagcgggtgacaatccgtacctgcggtataaccacgccgacgccgagtttcaggagcgtctgcaagaagatacgtcttttgggggcaacctcgggcgagcagtcttccaggccaagaagcgggttctcgaacctctcggtctggttgaggaaggcgctaagacggctcctggaaagaagagaccggtagagccatcaccccagcgttctccagactcctctacgggcatcggcaagaaaggccagcagcccgcgaaaaagagactcaactttgggcagactggcgactcagagtcagtgcccgaccctcaaccaatcggagaaccccccgcaggcccctctggtctgggatctggtacaatggctgcaggcggtggcgctccaatggcagacaataacgaaggcgccgacggagtgggtagttcctcaggaaattggcattgcgattccacatggctgggcgacagagtcatcaccaccagcacccgaacctgggccctccccacctacaacaaccacctctacaagcaaatctccaacgggacttcgggaggaagcaccaacgacaacacctacttcggctacagcaccccctgggggtattttgactttaacagattccactgccacttctcaccacgtgactggcagcgactcatcaacaacaactggggattccggcccaagagacccaacttcaagctcttcaacatccaggtcaaggaggtcacgcagaatgaaggcaccaagaccatcgccaataaccttaccagcacgattcaggtctttacggactcggaataccagctcccgtacgtcctcggctctgcgcaccagggctgcctgcctccgttcccggcggacgtcttcatgattcctcagtacgggtacctgactctgaacaatggcagtcaggccgtgggccgttcctccttctactgcctggagtactttccttctcaaatgctgagaacgggcaacaactttgagttcagctaccagtttgaggacgtgccttttcacagcagctacgcgcacagccaaagcctggaccggctgatgaaccccctcatcgaccagtacctgtactacctgtctcggactcagtccacgggaggtaccgcaggaactcagcagttgctattttctcaggccgggcctaataacatgtcggctcaggccaaaaactggctacccgggccctgctaccggcagcaacgcgtctccacgacactgtcgcaaaataacaacagcaactttgcctggaccggtgccaccaagtatcatctgaatggcagagactctctggtaaatcccggtgtcgctatggcaacccacaaggacgacgaagagcgattttttccgtccagcggagtcttaatgtttgggaaacagggagctggaaaagacaacgtggactatagcagcgttatgctaaccagtgaggaagaaattaaaaccaccaacccagtggccacagaacagtacggcgtggtggccgataacctgcaacagcaaaacgccgctcctattgtaggggccgtcaacagtcaaggagccttacctggcatggtctggcagaaccgggacgtgtacctgcagggtcctatctgggccaagattcctcacacggacggaaactttcatccctcgccgctgatgggaggctttggactgaaacacccgcctcctcagatcctgattaagaatacacctgttcccgcggatcctccaactaccttcagtcaagctaagctggcgtcgttcatcacgcagtacagcaccggacaggtcagcgtggaaattgaatgggagctgcagaaagaaaacagcaaacgctggaacccagagattcaatacacttccaactactacaaatctacaaatgtggactttgctgttaacacagatggcacttattctgagcctcgccccattggcacccgttacctcacccgtaatctgtaattgcttgttaatcaataaaccggttgattcgtttcagttgaactttggtctctgcgaagggcgaattc

SEQ ID NO: 4796 - protein, 738 aa, Adeno-associated virus
MAADGYLPDWLEDNLSEGIREWWDLKPGAPKPKANQQKQDDGRGLVLPGYKYLGPFNGLDKGEPVNAADAAALEHDKAYDQQLKAGDNPYLRYNHADAEFQERLQEDTSFGGNLGRAVFQAKKRVLEPLGLVEEGAKTAPGKKRPVEPSPQRSPDSSTGIGKKGQQPAKKRLNFGQTGDSESVPDPQPIGEPPAGPSGLGSGTMAAGGGAPMADNNEGADGVGSSSGNWHCDSTWLGDRVITTSTRTWALPTYNNHLYKQISNGTSGGSTNDNTYFGYSTPWGYFDFNRFHCHFSPRDWQRLINNNWGFRPKRPNFKLFNIQVKEVTQNEGTKTIANNLTSTIQVFTDSEYQLPYVLGSAHQGCLPPFPADVFMIPQYGYLTLNNGSQAVGRSSFYCLEYFPSQMLRTGNNFEFSYQFEDVPFHSSYAHSQSLDRLMNPLIDQYLYYLSRTQSTGGTAGTQQLLFSQAGPNNMSAQAKNWLPGPCYRQQRVSTTLSQNNNSNFAWTGATKYHLNGRDSLVNPGVAMATHKDDEERFFPSSGVLMFGKQGAGKDNVDYSSVMLTSEEEIKTTNPVATEQYGVVADNLQQQNAAPIVGAVNSQGALPGMVWQNRDVYLQGPIWAKIPHTDGNFHPSPLMGGFGLKHPPPQILIKNTPVPADPPTTFSQAKLASFITQYSTGQVSVEIEWELQKENSKRWNPEIQYTSNYYKSTNVDFAVNTDGTYSEPRPIGTRYLTRNL

SEQ ID NO: 4797 - protein, 738 aa, Adeno-associated virus
MAADGYLPDWLEDNLSEGIREWWDLKPGAPKPKANQQKQDDGRGLVLPGYKYLGPFNGLDKGEPVNAADAAALEHDKAYDQQLKAGDNPYLRYNHADAEFQERLQEDTSFGGNLGRAVFQAKKRVLEPLGLVEEAAKTAPGKKRPVEPSPQRSPDSSTGIGKKGQQPAKKRLNFGQTGDSESVPDPQPIGEPPAGPSGLGSGTMAAGGGAPMADNNEGADGVGSSSGNWHCDSTWLGDRVITTSTRTWALPTYNNHLYKQISNGTSGGSTNDNTYFGYSTPWGYFDFNRFHCHFSPRDWQRLINNNWGFRPKRLSFKLFNIQVKEVTQNEGTKTIANNLTSTIQVFTDSEYQLPYVLGSAHQGCLPPFPADVFMIPQYGYLTLNNGSQAVGRSSFYCLEYFPSQMLRTGNNFEFSYTFEDVPFHSSYAHSQSLDRLMNPLIDQYLYYLSRTQSTGGTQGTQQLLFSQAGPANMSAQAKNWLPGPCYRQQRVSTTLSQNNNSNFAWTGATKYHLNGRDSLVNPGVAMATHKDDEERFFPSSGVLMFGKQGAGRDNVDYSSVMLTSEEEIKTTNPVATEQYGVVADNLQQTNTGPIVGNVNSQGALPGMVWQNRDVYLQGPIWAKIPHTDGNFHPSPLMGGFGLKHPPPQILIKNTPVPADPPTTFSQAKLASFITQYSTGQVSVEIEWELQKENSKRWNPEIQYTSNYYKSTNVDFAVNTEGTYSEPRPIGTRYLTRNL

SEQ ID NO: 4798 - protein, 720 aa, Adeno-associated virus
MSFVDHPPDWLEEVGEGLREFLGLEAGPPKPKPNQQHQDQARGLVLPGYNYLGPGNGLDRGEPVNRADEVAREHDISYNEQLEAGDNPYLKYNHADAEFQEKLADDTSFGGNLGKAVFQAKKRVLEPFGLVEEGAKTAPTGKRIDDHFPKRKKARTEEDSKPSTSSDAEAGPSGSQQLQIPAQPASSLGADTMSAGGGGPLGDNNQGADGVGNASGDWHCDSTWMGDRVVTKSTRTWVLPSYNNHQYREIKSGSVDGSNANAYFGYSTPWGYFDFNRFHSHWSPRDWQRLINNYWGFRPRSLRVKIFNIQVKEVTVQDSTTTIANNLTSTVQVFTDDDYQLPYVVGNGTEGCLPAFPPQVFTLPQYGYATLNRDNTENPTERSSFFCLEYFPSKMLRTGNNFEFTYNFEEVPFHSSFAPSQNLFKLANPLVDQYLYRFVSTNNTGGVQFNKNLAGRYANTYKNWFPGPMGRTQGWNLGSGVNRASVSAFATTNRMELEGASYQVPPQPNGMTNNLQGSNTYALENTMIFNSQPANPGTTATYLEGNMLITSESETQPVNRVAYNVGGQMATNNQSSTTAPATGTYNLQEIVPGSVWMERDVYLQGPIWAKIPETGAHFHPSPAMGGFGLKHPPPMMLIKNTPVPGNITSFSDVPVSSFITQYSTGQVTVEMEWELKKENSKRWNPEIQYTNNYNDPQFVDFAPDSTGEYRTTRPIGTRYL

SEQ ID NO: 4799 - protein, 736 aa, Adeno-associated virus
MAADGYLPDWLEDNLSEGIREWWDLKPGAPKPKANQQKQDDGRGLVLPGYKYLGPFNGLDKGEPVNAADAAALEHDKAYDQQLKAGDNPYLRYNHADAEFQERLQEDTSFGGNLGRAVFQAKKRVLEPFGLVEEGAKTAPGKKRPVEQSPQEPDSSSGIGKTGQQPAKKRLNFGQTGDSESVPDPQPLGEPPATPAAVGPTTMASGGGAPMADNNEGADGVGNASGNWHCDSTWLGDRVITTSTRTWALPTYNNHLYKQISSASTGASNDNHYFGYSTPWGYFDFNRFHCHFSPRDWQRLINNNWGFRPKRLNFKLFNIQVKEVTTNDGVTTIANNLTSTVQVFSDSEYQLPYVLGSAHQGCLPPFPADVFMIPQYGYLTLNNGSQAVGRSSFYCLEYFPSQMLRTGNNFTFSYTFEDVPFHSSYAHSQSLDRLMNPLIDQYLYYLNRTQNQSGSAQNKDLLFSRGSPAGMSVQPKNWLPGPCYRQQRVSKTKTDNNNSNFTWTGASKYNLNGRESIINPGTAMASHKDDKDKFFPMSGVMIFGKESAGASNTALDNVMITDEEEIKATNPVATERFGTVAVNLQSSSTDPATGDVHVMGALPGMVWQDRDVYLQGPIWAKIPHTDGHFHPSPLMGGFGLKHPPPQILIKNTPVPANPPAEFSATKFASFITQYSTGQVSVEIEWELQKENSKRWNPEVQYTSNYAKSANVDFTVDNNGLYTEPRPIGTRYLTRPL

SEQ ID NO: 4800 - protein, 736 aa, Adeno-associated virus
MAADGYLPDWLEDNLSEGIREWWDLKPGAPKPKANQQKQDDGRGLVLPGYKYLGPFNGLDKGEPVNAADAAALEHDKAYDQQLKAGDNPYLRYNHADAEFQERLQEDTSFGGNLGRAVFQAKKRVLEPFGLVEEGAKTAPGKKRPVEQSPQEPDSSSGIGKTGQQPAKKRLNFGQTGDSESVPDPQPLGEPPATPAAVGPTTMASGGGAPMADNNEGADGVGNASGNWHCDSTWLGDRVITTSTRTWALPTYNNHLYKQISSASTGASNDNHYFGYSTPWGYFDFNRFHCHFSPRDWQRLINNNWGFRPKRLNFKLFNIQVKEVTTNDGVTTIANNLTSTVQVFSDSEYQLPYVLGSAHQGCLPPFPADVFMIPQYGYLTLNNGSQAVGRSSFYCLEYFPSQMLRTGNNFTFSYTFEDVPFHSSYAHSQSLDRLMNPLIDQYLYYLNRTQNQSGSAQNKDLLFSRGSPAGMSVQPKNWLPGPCYRQQRVSKTKTDNNNSNFTWTGASKYNLNGRESIINPGTAMASHKDDEDKFFPMSGVMIFGKESAGASNTALDNVMITDEEEIKATNPVATERFGTVAVNLQSSSTDPATGDVHVMGALPGMVWQDRDVYLQGPIWAKIPHTDGHFHPSPLMGGFGLKHPPPQILIKNTPVPANPPAEFSATKFASFITQYSTGQVSVEIEWELQKENSKRWNPEVQYTSNYAKSANVDFTVDNNGLYTEPRPIGTRYLTRPL

SEQ ID NO: 4801 - protein, 736 aa, Adeno-associated virus
MAADGYLPDWLEDNLSEGIREWWDLKPGAPKPKANQQKQDDGRGLVLPGYKYLGPFNGLDKGEPVNAADAAALEHDKAYDQQLKAGDNPYLRYNHADAEFQERLQEDTSFGGNLGRAVFQAKKRVLEPLGLVEEGAKTAPGKKRPVEQSPQEPDSSSGIGKTGQQPAKKRLNFGQTGDSESVPDPQPLGEPPATPAAVGPTTMASGGGAPMADNNEGADGVGNASGNWHCDSTWLGDRVITTSTRTWALPTYNNHLYKQISSASTGASNDNHYFGYSTPWGYFDFNRFHCHFSPRDWQRLINNNWGFRPKRLNFKLFNIQVKEVTTNDGVTTIANNLTSTVQVFSDSEYQLPYVLGSAHQGCLPPFPADVFMIPQYGYLTLNNGSQAVGRSSFYCLEYFPSQMLRTGNNFTFSYTFEDVPFHSSYAHSQSLDRLMNPLIDQYLYYLNRTQNQSGSAQNKDLLFSRGSPAGMSVQPKNWLPGPCYRQQRVSKTKTDNNNSNFTWTGASKYNLNGRESIINPGTAMASHKDDEDKFFPMSGVMIFGKESAGASNTALDNVMITDEEEIKATNPVATERFGTVAVNLQSSSTDPATGDVHVMGALPGMVWQDRDVYLQGPIWAKIPHTDGHFHPSPLMGGFGLKHPPPQILIKNTPVPANPPAEFSATKFASFITQYSTGQVSVEIEWELQKENSKRWNPEVQYTSNYAKSANVDFTVDNNGLYTEPRPIGTRYLTRPL

SEQ ID NO: 4802 - protein, 736 aa, Adeno-associated virus
MAADGYLPDWLEDNLSEGIREWWDLKPGAPKPKANQQKQDDGRGLVLPGYKYLGPFNGLDKGEPVNAADAAALEHDKAYDQQLKAGDNPYLRYNHADAEFQERLQEDTSFGGNLGRAVFQAKKRVLEPLGLVEEGAKTAPGKKRPVEQSPQEPDSSSGIGKTGQQPAKKRLNFGQTGDSESVPDPQPLGEPPATPAAVGPTTMASGGGAPMADNNEGADGVGNASGNWHCDSTWLGDRVITTSTRTWALPTYNNHLYKQISSASTGASNDNHYFGYSTPWGYFDFNRFHCHFSPRDWQRLINNNWGFRPKRLNFKLFNIQVKEVTTNDGVTTIANNLTSTVQVFSDSEYQLPYVLGSAHQGCLPPFPADVFMIPQYGYLTLNNGSQAVGRSSFYCLEYFPSQMLRTGNNFTFSYTFEDVPFHSSYAHSQSLDRLMNPLIDQYLYYLNRTQNQSGSAQNKDLLFSRGSPAGMSVQPKNWLPGPCYRQQRVSKTKTDNNNSNFTWTGASKYNLNGRESIINPGTAMASHKDDKDKFFPMSGVMIFGKESAGASNTALDNVMITDEEEIKATNPVATERFGTVAVNLQSSSTDPATGDVHVMGALPGMVWQDRDVYLQGPIWAKIPHTDGHFHPSPLMGGFGLKHPPPQILIKNTPVPANPPAEFSATKFASFITQYSTGQVSVEIEWELQKENSKRWNPEVQYTSNYAKSANVDFTVDNNGLYTEPRPIGTRYLTRPL

SEQ ID NO: 4803 - protein, 728 aa, Adeno-associated virus
MAADGYLPDWLEGNLSEGIREWWDLKPGAPKPKANQQKQDDGRGLVLPGYRYLGPFNGLDKGEPVNEADAAALEHDKAYDKQLEQGDNPYLKYNHADAEFQERLQEDTSFGGNLGRAVFQAKKRVLEPLGLVEEGAKTAPGKKRPIESPDSSTGIGKNGQPPAKKKLNFGQTGDSESVPDPQPLGEPPAAPSGLGSGTMAAGGGAPMADNNEGADGVGNASGNWHCDSTWLGDRVITTSTRTWALPTYNNHLYKQISSQSGATNDNHFFGYSTPWGYFDFNRFHCHFSPRDWQRLINNNWGFRPRKLRFKLFNIQVKEVTTNDGVTTIANNLTSTIQVFSDSEYQLPYVLGSAHQGCLPPFPADVFMIPQYGYLTLNNGSQSVGRSSFYCLEYFPSQMLRTGDNFEFSYTFEEVPFHSSYAHSQSLDRLMNPLIDQYLYYLARTQSTTGSTRELQFHQAGPNTMAEQSKNWLPGPCYRQQRLSKNIDSNNNSNFAWTGATKYHLNGRNSLTNPGVAMATNKDDEDQFFPINGVLVFGKTGAANKTTLENVLMTSEEEIKTTNPVATEEYGVVSSNLQSSTAGPQTQTVNSQGALPGMVWQNRDVYLQGPIWAKIPHTDGNFHPSPLMGGFGLKHPPPQILIKNTPVPANPPEVFTPAKFASFITQYSTGQVSVEIEWELQKENSKRWNPEIQYTSNYAKSNNVEFAVNNEGVYTEPRPIGTRYLTRNL

SEQ ID NO: 4804 - DNA, 2211 bp, Adeno-associated virus
atggctgccgatggttatcttccagattggctcgaggacaaccttagtgaaggaattcgcgagtggtgggctttgaaacctggagcccctcaacccaaggcaaatcaacaacatcaagacaacgctcgaggtcttgtgcttccgggttacaaataccttggacccggcaacggactcgacaagggggagccggtcaacgcagcagacgcggcggccctcgagcacgacaaggcctacgaccagcagctcaaggccggagacaacccgtacctcaagtacaaccacgccgacgccgagttccaggagcggctcaaagaagatacgtcttttgggggcaacctcgggcgagcagtcttccaggccaaaaagaggcttcttgaacctcttggtctggttgaggaagcggctaagacggctcctggaaagaagaggcctgtagagcagtctcctcaggaaccggactcctccgcgggtattggcaaatcgggtgcacagcccgctaaaaagagactcaatttcggtcagactggcgacacagagtcagtcccagaccctcaaccaatcggagaacctcccgcagccccctcaggtgtgggatctcttacaatggcttcaggtggtggcgcaccagtggcagacaataacgaaggtgccgatggagtgggtagttcctcgggaaattggcattgcgattcccaatggctgggggacagagtcatcaccaccagcacccgaacctgggccctgcccacctacaacaatcacctctacaagcaaatctccaacagcacatctggaggatcttcaaatgacaacgcctacttcggctacagcaccccctgggggtattttgacttcaacagattccactgccacttctcaccacgtgactggcagcgactcatcaacaacaactggggattccggcctaagcgactcaacttcaagctcttcaacattcaggtcaaagaggttacggacaacaatggagtcaagaccatcgccaataaccttaccagcacggtccaggtcttcacggactcagactatcagctcccgtacgtgctcgggtcggctcacgagggctgcctcccgccgttcccagcggacgttttcatgattcctcagtacgggtatctgacgcttaatgatggaagccaggccgtgggtcgttcgtccttttactgcctggaatatttcccgtcgcaaatgctaagaacgggtaacaacttccagttcagctacgagtttgagaacgtacctttccatagcagctacgctcacagccaaagcctggaccgactaatgaatccactcatcgaccaatacttgtactatctctcaaagactattaacggttctggacagaatcaacaaacgctaaaattcagtgtggccggacccagcaacatggctgtccagggaagaaactacatacctggacccagctaccgacaacaacgtgtctcaaccactgtgactcaaaacaacaacagcgaatttgcttggcctggagcttcttcttgggctctcaatggacgtaatagcttgatgaatcctggacctgctatggccagccacaaagaaggagaggaccgtttctttcctttgtctggatctttaatttttggcaaacaaggaactggaagagacaacgtggatgcggacaaagtcatgataaccaacgaagaagaaattaaaactactaacccggtagcaacggagtcctatggacaagtggccacaaaccaccagagtgcccaagcacaggcgcagaccggctgggttcaaaaccaaggaatacttccgggtatggtttggcaggacagagatgtgtacctgcaaggacccatttgggccaaaattcctcacacggacggcaactttcacccttctccgctgatgggagggtttggaatgaagcacccgcctcctcagatcctcatcaaaaacacacctgtacctgcggatcctccaacggccttcaacaaggacaagctgaactctttcatcacccagtattctactggccaagtcagcgtggagatcgagtgggagctgcagaaggaaaacagcaagcgctggaacccggagatccagtacacttccaactattacaagtctaataatgttgaatttgctgttaatactgaaggtgtatatagtgaaccccgccccattggcaccagatacctgactcgtaatctgtaa

SEQ ID NO: 4805 - protein, 736 aa, Adeno-associated virus
MAADGYLPDWLEDNLSEGIREWWALKPGAPQPKANQQHQDNARGLVLPGYKYLGPGNGLDKGEPVNAADAAALEHDKAYDQQLKAGDNPYLKYNHADAEFQERLKEDTSFGGNLGRAVFQAKKRLLEPLGLVEEAAKTAPGKKRPVEQSPQEPDSSAGIGKSGAQPAKKRLNFGQTGDTESVPDPQPIGEPPAAPSGVGSLTMASGGGAPVADNNEGADGVGSSSGNWHCDSQWLGDRVITTSTRTWALPTYNNHLYKQISNSTSGGSSNDNAYFGYSTPWGYFDFNRFHCHFSPRDWQRLINNNWGFRPKRLNFKLFNIQVKEVTDNNGVKTIANNLTSTVQVFTDSDYQLPYVLGSAHEGCLPPFPADVFMIPQYGYLTLNDGSQAVGRSSFYCLEYFPSQMLRTGNNFQFSYEFENVPFHSSYAHSQSLDRLMNPLIDQYLYYLSKTINGSGQNQQTLKFSVAGPSNMAVQGRNYIPGPSYRQQRVSTTVTQNNNSEFAWPGASSWALNGRNSLMNPGPAMASHKEGEDRFFPLSGSLIFGKQGTGRDNVDADKVMITNEEEIKTTNPVATESYGQVATNHQSAQAQAQTGWVQNQGILPGMVWQDRDVYLQGPIWAKIPHTDGNFHPSPLMGGFGMKHPPPQILIKNTPVPADPPTAFNKDKLNSFITQYSTGQVSVEIEWELQKENSKRWNPEIQYTSNYYKSNNVEFAVNTEGVYSEPRPIGTRYLTRNL

SEQ ID NO: 4806 - DNA, 2460 bp, Adeno-associated virus
ggtaattcctccggaaattggcattgcgattccacatggctgggcgaccgagtcattaccaccagcacccggacttgggccctgcccacctacaacaaccacctctacaagcaaatctccagccaatcgggtgccaccaacgacaaccactacttcggctacagcaccccttgggggtattttgatttcaacagattccactgccatttctcaccacgtgactggcagcgactcatcaacaacaactggggattcatggctgccgatggttatcttccagattggctcgaggacactctctctgaaggaatcagacagtggtggaagctcaaacctggcccaccaccgccgaaacctaaccaacaacaccgggacgacagtaggggtcttgtgcttcctgggtacaagtacctcggacccttcaacggactcgacaaaggagagccggtcaacgaggcagacgccgcggccctcgagcacgacaaagcctacgaccaccagctcaagcaaggggacaacccgtacctcaaatacaaccacgcggacgctgaatttcaggagcgtcttcaagaagatacgtctttcgggggcaacctcgggcgagcagtcttccaggccaaaaagagggtactcgagcctcttggtctggttgaggaagctgttaagacggctcctggaaaaaagagacctatagagcagtctcctgcagaaccggactcttcctcgggcatcggcaaatcaggccagcagcccgctaagaaaagactcaattttggtcagactggcgacacagagtcagtcccagaccctcaaccaatcggagaaccccccgcagccccctctggtgtgggatctaatacaatggcttcaggcggtggggcaccaatggcagacaataacgaaggcgccgacggagtgggtaattcctcgggaaattggcattgcgattccacatggatgggcgacagagttatcaccaccagcacaagaacctgggccctccccacctacaataatcacctctacaagcaaatctccagcgaatcgggagccaccaacgacaaccactacttcggctacagcaccccctgggggtattttgactttaacagattccactgtcacttctcaccacgtgactggcagcgactcatcaacaacaactggggatttagacccaagaaactcaatttcaagctcttcaacatccaagtcaaggaggtcacgcagaatgatggaaccacgaccatcgccaataaccttaccagcacggtgcaggtcttcacagactctgagtaccagctgccctacgtcctcggttcggctcaccagggctgccttccgccgttcccagcagacgtcttcatgattcctcagtacggctacttgactctgaacaatggcagccaagcggtaggacgttcttcattctactgtctagagtattttccctctcagatgctgaggacgggaaacaacttcaccttcagctacacttttgaagacgtgcctttccacagcagctacgcgcacagccagagtctggatcggctgatgaatcctctcattgaccagtacctgtattacctgagcaaaactcagggtacaagtggaacaacgcagcaatcgagactgcagttcagccaagctgggcctagctccatggctcagcaggccaaaaactggctaccgggacccagctaccgacagcagcgaatgtctaagacggctaatgacaacaacaacagtgaatttgcttggactgcagccaccaaatattacctgaatggaagaaattctctggtcaatcccgggcccccaatggccagtcacaaggacgatgaggaaaagtatttccccatgcacggaaatctcatctttggaaaacaaggcacaggaactaccaatgtggacattgaatcagtgcttattacagacgaagaagaaatcagaacaactaatcctgtggctacagaacaatacggacaggttgccaccaaccatcagagtcagaacaccacagcttcctatggaagtgtggacagccagggaatcttacctggaatggtgtggcaggaccgcgatgtctatcttcaaggtcccatttgggccaaaactcctcacacggacggacactttcatccttctccgctcatgggaggctttggactgaaacaccctcctccccagatcctgatcaaaaacacacctgtgccagcgaatcccgcgaccactttcactcctggaaagtttgcttcgttcattacccagtattccaccggacaggtcagcgtggaaatagagtgggagctgcagaaagaaaacagcaaacgctggaacccagaaattcagtacacctccaactacaacaagtcggtgaatgtggagtttaccgtggacgcaaacggtgtttattctgaaccccgccctattggcactcgttaccttacccggaacttg

SEQ ID NO: 4807 - DNA, 3123 bp, Adeno-associated virus
gaattcgccctttctacggctgcgtcaactggaccaatgaaaactttcccttcaacgattgcgtcgacaagatggtgatctggtgggaggagggaaagatgaccgccaaggtcgtggaatctgccaaagccattctgggtggaggcaaggttcgtgtggaccagaaatgcaagtcttcggcccagatcgacccgactccggtgattgtcacctctaacaccaacatgtgcgccgtgattgacggaaactcgaccaccttcgagcaccagcagccgttgcaagaccggatgttcaaatttgaacttacccgccgtttggatcatgactttgggaaggtcaccaagcaggaagtcaaagactttttccggtgggctcaagatcacgtgactgaggtggagcatgagttctacgtcaaaaagggtggagccaagaaaaggcccgcccccgatgatgtatatataaatgagcccaagcgggcgcgcgagtcagttgcgcagccatcgacgtcagacgcggaagcttcgataaactacgcggacaggtaccaaaacaaatgttctcgtcacgtgggcatgaatctgatgctgtttccctgtcgacaatgcgaaagaatgaatcagaattcaaatatctgcttcacacacgggcaaaaagactgtttggaatgctttcccgtgtcagaatctcaacccgtttctgtcgtcagaaaaacgtatcagaaactttgttacattcatcatatcatgggaaaagtaccagacgcctgcactgcctgcgacctggtaaatgtggacttggatgactgtatttctgagcaataaatgacttaaatcaggtatggctgctgacggttatcttccagattggctcgaggacactctctctgaaggaatcagacagtggtggaagctcaaacctggcccaccaccgccgaaacctaaccaacaacaccgggacgacagtaggggtcttgtgcttcctgggtacaagtacctcggacccttcaacggactcgacaaaggagagccggtcaacgaggcagacgccgcggccctcgagcacgacaaagcctacgaccaccagctcaagcaaggggacaacccgtacctcaaatacaaccacgcggacgctgaatttcaggagcgtcttcaagaagatacgtctttcgggggcaacctcgggcgagcagtcttccaggccaaaaagagggtactcgagcctcttggtctggttgaggaagctgttaagacggctcctggaaaaaagagacctatagagcagtctcctgcagaaccggactcttcctcgggcatcggcaaatcaggccagcagcccgctaagaaaagactcaattttggtcagactggcgacacagagtcagtcccaggccctcaaccaatcggagaaccccccgcagccccctctggtgtgggatctaatacaatggcttcaggcggtggggcaccaatggcagacaataacgaaggcgccgacggagtgggtaattcctcgggaaattggcattgcgattccacatggatgggcgacagagttatcaccaccagcacaagaacctgggccctccccacctacaataatcacctctacaagcaaatctccagcgaatcgggagccaccaacgacaaccactacttcggctacagcaccccctgggggtattttgactttaacagattccactgtcacttctcaccacgtgactggcagcgactcatcaacaacaactggggatttagacccaagaaactcaatttcaagctcttcaacatccaagtcaaggaggtcacgcagaatgatggaaccacgaccatcgccaataaccttaccagcgcggtgcaggtcttcacagactctgagtaccagctgccctacgtcctcggttcggctcaccagggctgccttccgccgttcccagcagacgtcttcatgattcctcagtacggctacttgactctgaacaatggcagccaagcggtaggacgttcttcattctactgtctagagtattttccctctcagatgctgaggacgggaaacaacttcaccttcagctacacttttgaagacgtgcctttccacagcagctacgcgcacagccagagtctggatcggctgatgaatcctctcattgaccagtacctgtattacctgagcaaaactcagggtacaagtggaacaacgcagcaatcgagactgcagttcagccaagctgggcctagctccatggctcagcaggccaaaaactggctaccgggacccagctaccgacagcagcgaatgtctaagacggctaatgacaacaacaacagtgaatttgcttggactgcagccaccaaatattacctgaatggaagaaattctctggtcaatcccgggcccccagtggccagtcacaaggacgatgaggaaaagtatttccccatgcacggaaatctcatctttggaaaacaaggcacaggaactaccaatgtggacattgaatcagtgcttattacagacgaagaagaaatcagaacaactaatcctgtggctacagaacaatacggacaggttgccaccaaccatcagagtcagaacaccacagcttcctatggaagtgtggacagccagggaatcttacctggaatggtgtggcaggaccgcgatgtctatcttcaaggtcccatttgggccaaaactcctcacacggacggacactttcatccttctccgctcatgggaggctttggactgaaacaccctcctccccagatcctgatcaaaaacacacctgtgccagcgaatcccgcgaccactttcactcctggaaagtttgcttcgttcattacccagtattccacctgacaggtcagcgtggaaatagagtgggagctgcagaaagaaaacagcaaacgctggaacccagaaattcagtacacctccaactacaacaagtcggtgaatgtggagtttaccgtggacgcaaacggtgtttattctgaaccccgccctattggcactcgttaccttacccggaacttgtaatttcctgttaatgaataagccgatttatgcgtttcagttgaactttggtctctgcgaagggcgaattcgtttaaacct

SEQ ID NO: 4808 - protein, 735 aa, Adeno-associated virus
MAADGYLPDWLEDTLSEGIRQWWKLKPGPPPPKPNQQHRDDSRGLVLPGYKYLGPFNGLDKGEPVNEADAAALEHDKAYDHQLKQGDNPYLKYNHADAEFQERLQEDTSFGGNLGRAVFQAKKRVLEPLGLVEEAVKTAPGKKRPIEQSPAEPDSSSGIGKSGQQPAKKRLNFGQTGDTESVPGPQPIGEPPAAPSGVGSNTMASGGGAPMADNNEGADGVGNSSGNWHCDSTWMGDRVITTSTRTWALPTYNNHLYKQISSESGATNDNHYFGYSTPWGYFDFNRFHCHFSPRDWQRLINNNWGFRPKKLNFKLFNIQVKEVTQNDGTTTIANNLTSAVQVFTDSEYQLPYVLGSAHQGCLPPFPADVFMIPQYGYLTLNNGSQAVGRSSFYCLEYFPSQMLRTGNNFTFSYTFEDVPFHSSYAHSQSLDRLMNPLIDQYLYYLSKTQGTSGTTQQSRLQFSQAGPSSMAQQAKNWLPGPSYRQQRMSKTANDNNNSEFAWTAATKYYLNGRNSLVNPGPPVASHKDDEEKYFPMHGNLIFGKQGTGTTNVDIESVLITDEEEIRTTNPVATEQYGQVATNHQSQNTTASYGSVDSQGILPGMVWQDRDVYLQGPIWAKTPHTDGHFHPSPLMGGFGLKHPPPQILIKNTPVPANPATTFTPGKFASFITQYSTGQVSVEIEWELQKENSKRWNPEIQYTSNYNKSVNVEFTVDANGVYSEPRPIGTRYLTRNL

SEQ ID NO: 4809 - DNA, 3123 bp, Adeno-associated virus
gaattcgccctttctacggctgcgtcaactggaccaatgaaaactttcccttcaacgattgcgtcgacaagatggtgatctggtgggaggagggaaagatgaccgccaaggtcgtggaatctgccaaagccattctgggtggaagcaaggttcgtgtggaccagaaatgcaagtcttcggcccagatcgacccgactccggtgattgtcacctctaacaccaacatgtgcgccgtgattgacggaaactcgaccaccttcgagcaccagcagccgttgcaagaccggatgttcaaatttgaacttacccgccgtttggatcatgactttgggaaggtcaccaagcaggaagtcaaagactttttccggtgggctcaagatcacgtgactgaggtggagcatgagttctacgtcaaaaagggtggagccaagaaaaggcccgcccccgatgatgtatatataaatgagcccaagcgggcgcgcgagtcagttgcgcagccatcgacgtcagacgcggaagcttcgataaactacgcgggcaggtaccaaaacaaatgttctcgtcacgtgggcatgaatctgatgctgtttccctgtcgacaatgcgaaagaatgaatcagaattcaaatatctgcttcacacacgggcaaaaagactgtttggaatgctttcccgtgtcagaatctcaacccgtttctgtcgtcagaaaaacgtatcagaaactttgttacattcatcatatcatgggaaaagaaccagacgcctgcactgcctgcgacctggtaaatgtggacttggatgactgtatttctgagcaataaatgacttaaatcaggtatggctgctgacggttatcttccagattggctcgaggacactctctctgaaggaatcagacagtggtggaagctcaaacctggcccaccaccgccgaaacctaaccaacaacaccgggacgacagtaggggtcttgtgcttcctgggtacaagtacctcggacccttcaacggactcgacaaaggagagccggtcaacgaggcagacgccgcggccctcgagcacgacaaagcctacgaccaccagctcaagcaaggggacaacccgtacctcaaatacaaccacgcggacgctgaatttcaggagcgtcttcaagaagatacgtctttcgggggcaacctcgggcgagcagtcttccaggccaaaaagagggtactcgagcctcttggtctggttgaggaagctgttaagacggctcctggaaaaaagagacctatagagcagtctcctgcagaaccggactcttcctcgggcatcggcgaatcaggccagcagcccgctaagaaaagactcaattttggtcagactggcgacacagagtcagtcccagaccctcaaccaatcggagaaccccccgcagccccctctggtgtgggatctaatacaatggcttcaggcggtggggcaccaatggcagacgataacgaaggcgccgacggagtgggtaattcctcgggaaattggcattgcgattccacatggatgggcgacagagttatcaccaccagcacaagaacctgggccctccccacctacaataatcacctctacaagcaaatctccagcgaatcgggagccaccaacgacaaccactacttcggctacagcaccccctgggggtattttgactttaacagattccactgtcacttctcaccacgtgactggcagcgactcatcaacaacaactggggatttagacccaagaaactcaatttcaagctcttcaacatccaagtcaaggaggtcacgcagaatgatggaaccacgaccatcgccaataaccttaccagcacggtgcaggtcttcacagactctgagtaccagctgccctacgtcctcggttcggctcaccagggctgccttccgccgttcccagcagacgtcttcatgattcctcagtacggctacttgactctgaacaatggcagccaagcggtaggacgttcttcattctactgtctagagtattttccctctcagatgctgaggacgggaaacaacttcaccttcagctacacttttgaagacgtgcctttccacagcagctacgcgcacagccagagtctggatcggctgatgaatcctctcattgaccagtacctgtattacctgagcaaaactcagggtacaagtggaacaacgcagcaatcgagactgcagttcagccaagctgggcctagctccatggctcagcaggccaaaaactggctaccgggacccagctaccgacagcagcgaatgtctaagacggctaatgacaacaacaacagtgaatttgcttggactgcagccaccaaatattacctgaatggaagaaattctctggtcaatcccgggcccccaatggccagtcacaaggacgatgaggaaaagtatttccccatgcacggaaatctcatctttggaaaacaaggcacaggaactaccaatgtggacattgaatcagtgcttattacagacgaagaagaaatcagaacaactaatcctgtggctacagaacaatacggacaggttgccaccaaccatcagagtcaggacaccacagcttcctatggaagtgtggacagccagggaatcttacctggaatggtgtggcaggaccgcgatgtctatcttcaaggtcccatttgggccaaaactcctcacacggacggacactttcatccttctccgctcatgggaggctttggactgaaacaccctcctccccagatcctgatcaaaaacacacctgtgccagcgaatcccgcgaccactttcactcctggaaagtttgcttcgttcattacccagtattccaccggacaggtcagcgtggaaatagagtgggagctgcagaaagaaaacagcaaacgctggaacccagaaattcagtacacctccaactacaacaagtcggtgaatgtggagtttaccgtggacgcaaacggtgtttattctgaaccccgccctattggcactcgttaccttacccggaacttgtaatttcctgttaatgaataaaccgatttatgcgtttcagttgaactttggtctctgcgaagggcgaattcgcggccgcta

SEQ ID NO: 4810 - protein, 735 aa, Adeno-associated virus
MAADGYLPDWLEDTLSEGIRQWWKLKPGPPPPKPNQQHRDDSRGLVLPGYKYLGPFNGLDKGEPVNEADAAALEHDKAYDHQLKQGDNPYLKYNHADAEFQERLQEDTSFGGNLGRAVFQAKKRVLEPLGLVEEAVKTAPGKKRPIEQSPAEPDSSSGIGESGQQPAKKRLNFGQTGDTESVPDPQPIGEPPAAPSGVGSNTMASGGGAPMADDNEGADGVGNSSGNWHCDSTWMGDRVITTSTRTWALPTYNNHLYKQISSESGATNDNHYFGYSTPWGYFDFNRFHCHFSPRDWQRLINNNWGFRPKKLNFKLFNIQVKEVTQNDGTTTIANNLTSTVQVFTDSEYQLPYVLGSAHQGCLPPFPADVFMIPQYGYLTLNNGSQAVGRSSFYCLEYFPSQMLRTGNNFTFSYTFEDVPFHSSYAHSQSLDRLMNPLIDQYLYYLSKTQGTSGTTQQSRLQFSQAGPSSMAQQAKNWLPGPSYRQQRMSKTANDNNNSEFAWTAATKYYLNGRNSLVNPGPPMASHKDDEEKYFPMHGNLIFGKQGTGTTNVDIESVLITDEEEIRTTNPVATEQYGQVATNHQSQDTTASYGSVDSQGILPGMVWQDRDVYLQGPIWAKTPHTDGHFHPSPLMGGFGLKHPPPQILIKNTPVPANPATTFTPGKFASFITQYSTGQVSVEIEWELQKENSKRWNPEIQYTSNYNKSVNVEFTVDANGVYSEPRPIGTRYLTRNL

SEQ ID NO: 4811 - DNA, 3113 bp, Adeno-associated virus
gaattcgccctttctacggctgcgtcaactggaccaatgaaaactttcccttcaacgattgcgtcgacaagatggtgatctggtgggaggagggaaagatgaccgccaaggtcgtggaatctgccaaagccattctgggtggaagcaaggttcgtgtggaccagaaatgcaagtcttcggcccagatcgacccgactccggtgattgtcacctctaacaccaacatgtgcgccgtgattgacggaaactcgaccaccttcgagcaccagcagccgttgcaagaccggatgttcaaatttgaacttacccgccgtttggatcatgactttgggaaggtcaccaagcaggaagtcaaagactttttccggtgggctcaagatcacgtgactgaggtggagcatgagttctacgtcaaaaagggtggagccaagaaaaggcccgcccccgatgatgtatatataaatgagcccaagcgggcgcgcgagtcagttgcgcagccatcgacgtcagacgcggaagcttcgataaactacgcggacaggtaccaaaacaaatgttctcgtcacgtgggcatgaatctgatgctgtttccctgtcgacaatgcgaaagaatgaatcagaattcaaatatctgcttcacacacgggcaaaaagactgtttggaatgctttcccgtgtcagaatctcaacccgttcctgtcgtcagaaaaacgtatcagaaactttgttacattcatcatatcatgggaaaagtaccagacgcctgcactgcctgcgacctggtaaatgtggacttggatgactgtatttctgagcaataaatgacttaaatcaggtatggctgctgacggttatcttccagattggctcgaggacactctctctgaaggaatcagacagtggtggaagctcaaacctggcccaccaccgccgaaacctaaccaacaacaccgggacgacagtaggggtcttgtgcttcctgggtacaagtacctcggacccttcaacggactcgacaaaggagagccggtcaacgaggcagacgccgcggccctcgagcacgacaaagcctacgaccaccagctcaagcaaggggacaacccgtacctcaaatacaaccacgcggacgctgaatttcaggagcgtcttcaagaagatacgtctttcgggggcaacctcgggcgagcagtcttccaggccaaaaagagggtactcgagcctcttggtctggttgaggaagctgttaagacggctcctggaaaaaagagacctatagagcagtctcctgcagaaccggactcttcctcgggcatcggcaaatcaggccagcagcccgctaagaaaagactcaattttggtcagactggcgacacagagtcagtcccagaccctcaaccaatcggagaaccccccgcagccccctctggtgtgggatctaatacaatggcttcaggcggtggggcaccaatggcagacaataacgaaggcgccgacggagtgggtaattcctcgggaaattggcattgcgattccacatggatgggcgacagagttatcaccaccagcacaagaacctgggccctccccacctacaataatcacctctacaagcaaatctccagcgaatcgggagccaccaacgacaaccactacttcggctacagcaccccctgggggtattttgactttaacagattccactgtcacttctcaccacgtgactggcagcgactcatcaataacaactggggatttagacccaagaaactcaatttcaagctcttcaacatccaagtcaaggaggtcacgcagaatgatggaaccacgaccatcgccaataaccttaccagcacggtgcaggtcttcacagactctgagtaccagctgccctacgtcctcggttcggctcaccagggctgccttccgccgttcccagcagacgtcttcatgattcctcagtacggctacttgactctgaacaatggcagccaagcggtaggacgttcttcattctactgtctagagtattttccctctcagatgctgaggacgggaaacaacttcaccttcagctacacttttgaagacgtgcctttccacagcagctacgcgcacagccagagtctggatcggctgatgaatcctctcattgaccagtacctgtattacctgagcaaaactcagggtacaagtggaacaacgcagcaatcgagactgcagttcaaccaagctgggcctagctccatggctcagcaggccaaaaactggctaccgggacccagctaccgacagcagcgaatgtctaagacggctaatgacaacaacaacagtgaatttgcttggactgcagccaccaaatattacccgaatggaagaaattctctggtcaatcccgggcccccaatggccagtcacaaggacgatgaggaaaagtatttccccatgcacggaaatctcatctttggaaaacaaggcacaggaactaccaatgtggacattgaatcagtgcttattacagacgaagaagaaatcagaacgactaatcctgtggctacagaacaatacggacaggttgccaccaaccgtcagagtcagaacaccacagcttcctatggaagtgtggacagccagggaatcttacctggaatggtgtggcaggaccgcgatgtctatcttcaaggtcccatttgggccaaaactcctcacacggacggacactttcatccttctccgctcatgggaggctttggactgaaacaccctcctccccagatcctgatcaaaaacacacctgtgccagcgaatcccgcgaccactttcactcctggaaagtttgcttcgttcattacccagtattccaccggacaggtcagcgtggaaatagagtgggagctgcagaaagaaaacagcaaacgctggaacccggaaattcagtacacctccaactacaacaagtcggtgaatgtggagtttaccgtggacgcaaacggtgtttattctgaaccccgccctattggcactcgttaccttacccggaacttgtaatttcctgttaatgaataaaccgatttatgcgtttcagttgaactttggtctctgcgaagggcgaattc

SEQ ID NO: 4812 - protein, 735 aa, Adeno-associated virus
MAADGYLPDWLEDTLSEGIRQWWKLKPGPPPPKPNQQHRDDSRGLVLPGYKYLGPFNGLDKGEPVNEADAAALEHDKAYDHQLKQGDNPYLKYNHADAEFQERLQEDTSFGGNLGRAVFQAKKRVLEPLGLVEEAVKTAPGKKRPIEQSPAEPDSSSGIGKSGQQPAKKRLNFGQTGDTESVPDPQPIGEPPAAPSGVGSNTMASGGGAPMADNNEGADGVGNSSGNWHCDSTWMGDRVITTSTRTWALPTYNNHLYKQISSESGATNDNHYFGYSTPWGYFDFNRFHCHFSPRDWQRLINNNWGFRPKKLNFKLFNIQVKEVTQNDGTTTIANNLTSTVQVFTDSEYQLPYVLGSAHQGCLPPFPADVFMIPQYGYLTLNNGSQAVGRSSFYCLEYFPSQMLRTGNNFTFSYTFEDVPFHSSYAHSQSLDRLMNPLIDQYLYYLSKTQGTSGTTQQSRLQFNQAGPSSMAQQAKNWLPGPSYRQQRMSKTANDNNNSEFAWTAATKYYPNGRNSLVNPGPPMASHKDDEEKYFPMHGNLIFGKQGTGTTNVDIESVLITDEEEIRTTNPVATEQYGQVATNRQSQNTTASYGSVDSQGILPGMVWQDRDVYLQGPIWAKTPHTDGHFHPSPLMGGFGLKHPPPQILIKNTPVPANPATTFTPGKFASFITQYSTGQVSVEIEWELQKENSKRWNPEIQYTSNYNKSVNVEFTVDANGVYSEPRPIGTRYLTRNL

SEQ ID NO: 4813 - DNA, 3122 bp, Adeno-associated virus
agcggccgcgaattcgccctttctacggctgcgtcaactggaccaatgaaaactttcccttcaacgattgcgtcgacaagatggtgatctggtgggaggagggaaagatgaccgccaaggtcgtggaatctgccaaagccattctgggtggaagcaaggttcgtgtggaccagaaatgcaggtcttcggcccagatcgacccgactccggtgattgtcacctctaacaccaacatgtgcgccgtgattgacggaaactcgaccaccttcgagcaccagcagccgttgcaagaccggatgttcaaatttgaacttacccgccgtttggatcatgactttgggaaggtcaccaagcaggaagtcaaagactttttccggtgggctcaagatcacgtgactgaggtggagcatgagttctacgtcaaaaagggtggagccaagaaaaggcccgcccccgatgatgtatatataaatgagcccaagcgggcgcgcgagtcagttgcgcagccatcgacgtcagacgcggaagcttcgataaactacgcggacaggtaccaaaacaaatgttctcgtcacgtgggcatgaatctgatgctgtttccctgtcgacaatgcgaaagaatgaatcagaattcaaatatctgcttcacacacgggcaaaaagactgtttggaatgctttcccgtgtcagaatctcaacccgtttctgtcgtcagaaaaacgtatcagaaactttgttacattcatcatatcatgggaaaagtaccagacgcctgcactgcctgcgacctggtaaatgtggacttggatgactgtatttctgagcaataaatgacttaaatcaggtatggctgctgacggttatcttccagattggctcgaggacactctctctgaaggaatcagacagtggtggaagctcaaacctggcccaccaccgccgaaacctaaccaacaacaccgggacgacagtaggggtcttgtgcttcctgggtacaagtacctcggacccttcaacggactcgacaaaggagagccggtcaacgaggcagacgccgcggccctcgagcacgacaaagcctacgaccaccagctcaagcaaggggacaacccgtacctcaaatacaaccacgcggacgctgaatttcaggagcgtcttcaagaagatacgtctttcgggggcaacctcgggcgagcagtcttccaggccaaaaagagggtactcgagcctcttggtctggttgaggaagctgttaagacggctcctggaaaaaagagacctatagagcagtctcctgcagaaccggactcttcctcgggcatcggcaaatcaggccagcagcccgctaagaaaagactcaattttggtcagactggcgacacagagtcagtcccagaccctcaaccaatcggagaaccccccgcagccccctctggtgtgggatctaatacaatggcttcaggcggtggggcaccaatggcagacaataacgaaggcgccgacggagtgggtaattcctcgggaaattggcattgcgattccacatggatgggcgacagagttatcaccaccagcacaagaacctgggccctccccacctacaataatcgcctctacaagcaaatctccagcgaatcgggagccaccaacgacaaccactacttcggctacagcaccccctgggggtattttgactttaacagattccactgtcacttctcaccacgtgactggcagcgactcatcaacaacaactggggatttagacccaagaaactcaatttcaagctcttcaacatccaagtcaaggaggtcacgcagaatgatggaaccacgaccatcgccaataaccttaccagcacggtgcaggtcttcacagactctgagtaccagctgccctacgtcctcggttcggctcaccagggctgccttccgccgttcccagcagacgtcttcatgattcctcagtacggctacttgactctgaacaatggcagccaagcggtaggacgttcttcattctactgtctagagtattttccctctcagatgctgaggacgggaaacaacttcaccttcagctacacttttgaagacgtgcctttccacagcagctacgcgcacagccagagtctggatcggctgatgaatcctctcattgaccagtacctgtattacctgagcaaaactcagggtacaagtggaacaacgcagcaatcgagactgcagttcagccaagctgggcctagctccatggctcagcaggccaaaaactggctaccgggacccagctaccgacagcagcgaatgtctaagacggctaatgacaacaacaacagtgaatttgcttggactgcagccaccaaatattacctgaatggaagaaattctctggtcaatcccgggcccccaatggccagtcacaaggacgatgaggaaaagtatttccccatgcacggaaatctcatctttggaaaacaaggcacaggaactaccaatgtggacattgaatcagtgcttattacagacgaagaagaaatcagaacaactaatcctgtggctacagaacaatacggacaggttgccaccaaccatcagagtcagaacaccacagcttcctatggaagtgtggacagccagggaatcttacctggaatggtgtggcaggaccgcgatgtctatcttcaaggtcccatttgggccaaaactcctcacacggacggacactttcatccttctccgctcatgggaggctttggactgaaacaccctcctccccagatcctgatcaaaaacacacctgtgccagcgaatcccgcgaccactttcactcctggaaagtttgcttcgttcattacccagtattccaccggacaggtcagcgtggaaatagagtgggagctgcagaaagaaaacagcaaacgctggaacccagaaattcagtacacctccaactacaacaagtcggtgaatgtggagtttaccgtggacgcaaacggtgtttattctgaaccccgccctattggcactcgttaccttacccggaacttgtaatttcctgttaatgaataaaccgatttatgcgtttcagttgaactttggtctctgcgaagggcgaattc

SEQ ID NO: 4814 - protein, 735 aa, Adeno-associated virus
MAADGYLPDWLEDTLSEGIRQWWKLKPGPPPPKPNQQHRDDSRGLVLPGYKYLGPFNGLDKGEPVNEADAAALEHDKAYDHQLKQGDNPYLKYNHADAEFQERLQEDTSFGGNLGRAVFQAKKRVLEPLGLVEEAVKTAPGKKRPIEQSPAEPDSSSGIGKSGQQPAKKRLNFGQTGDTESVPDPQPIGEPPAAPSGVGSNTMASGGGAPMADNNEGADGVGNSSGNWHCDSTWMGDRVITTSTRTWALPTYNNRLYKQISSESGATNDNHYFGYSTPWGYFDFNRFHCHFSPRDWQRLINNNWGFRPKKLNFKLFNIQVKEVTQNDGTTTIANNLTSTVQVFTDSEYQLPYVLGSAHQGCLPPFPADVFMIPQYGYLTLNNGSQAVGRSSFYCLEYFPSQMLRTGNNFTFSYTFEDVPFHSSYAHSQSLDRLMNPLIDQYLYYLSKTQGTSGTTQQSRLQFSQAGPSSMAQQAKNWLPGPSYRQQRMSKTANDNNNSEFAWTAATKYYLNGRNSLVNPGPPMASHKDDEEKYFPMHGNLIFGKQGTGTTNVDIESVLITDEEEIRTTNPVATEQYGQVATNHQSQNTTASYGSVDSQGILPGMVWQDRDVYLQGPIWAKTPHTDGHFHPSPLMGGFGLKHPPPQILIKNTPVPANPATTFTPGKFASFITQYSTGQVSVEIEWELQKENSKRWNPEIQYTSNYNKSVNVEFTVDANGVYSEPRPIGTRYLTRNL

SEQ ID NO: 4815 - protein, 733 aa, Adeno-associated virus
MAADGYLPDWLEDNLSEGIREWWDLKPGAPKPKANQQKQDDGRGLVLPGYKYLGPFNGLDKGEPVNAADAAALEHDKAYDQQLKAGDNPYLRYNHADAEFQERLQEDTSFGGNLGRAVFQAKKRVLEPLGLVEEGAKTAPGKKRPLESPQEPDSSSGIGKKGKQPAKKRLNFEEDTGAGDGPPEGSDTSAMSSDIEMRAAPGGNAVDAGQGSDGVGNASGDWHCDSTWSEGKVTTTSTRTWVLPTYNNHLYLRLGTTSNSNTYNGFSTPWGYFDFNRFHCHFSPRDWQRLINNNWGLRPKAMRVKIFNIQVKEVTTSNGETTVANNLTSTVQIFADSSYELPYVMDAGQEGSLSPFPNDVFMVPQYGYCGIVTGENQNQTDRNAFYCLEYFPSQMLRTGNNFEMAYNFGKVPFHSMYAYSQSPDRLMNPLLDQYLWHLQSTTSGETLNQGNAATTFGKIRSGDFAFYRKNWLPGPCVKQQRLSKTASQNYKIPASGGNALLKYDTHYTLNNRWSNIAPGPPMATAGPSDGDFSNAQLIFPGPSVTGNTTTSANNLLFTSEEEIAATNPRDTDMFGQIADNNQNATTAPITGNVTAMGVLPGMVWQNRDIYYQGPIWAKIPHADGHFHPSPLIGGFGLKHPPPQIFIKNTPVPANPATTFTAARVDSFITQYSTGQVAVQIEWEIEKERSKRWNPEVQFTSNYGNQSSMLWAPDTTGKYTEPRVIGSRYLTNHL

SEQ ID NO: 4816 - protein, 733 aa, Adeno-associated virus
MAADGYLPDWLEDNLSEGIREWWDLKPGAPKLKANQQKQDDGRGLVLPGYKYLGPFHGLDKGEPVNAADAAALEHDKAYDQQLKAGDNPYLRYNHADAEFQERLQEDTSFGGNLGRAVFQAKKRVLEPLGLVEEGAKTAPGKKRPLESPQEPDSSSGIGKKGKQPAKKRLNFEEDTGAGDGPPEGSDTSAMSSDIEMRAAPGGNAVDAGQGSDGVGNASGDWHCDSTWSEGKVTTTSTRTWVLPTYNNHLYLRLGTTSNSNTYNGFSTPWGYFDFNRFHCHFSPRDWQRLINNNWGLRPKAMRVKIFNIQVKEVTTSNGETTVANNLTSTVQIFADSSYELPYVMDAGQEGSLPPFPNDVFMVPQYGYCGIVTGENQNQTDRNAFYCLEYFPSQMLRTGNNFEMAYNFEKVPFHSMYAHSQSLDRLMNPLLDQYLWHLQSTTSGETLNQGNAATTFGKIRSGDFAFYRKNWLPGPCVKQQRFSKTASQNYKIPASGGNALLKYDTHYTLNNRWSNIAPGPPMATAGPSDGDFSNAQLIFPGPSVTGNTTTSANNLLFTSEGEIAATNPRDTDMFGQIADNNQNATTAPITGNVTAMGVLPGMVWQNRDIYYQGPIWAKIPHADGHFHPSPLIGGFGLKHPPPQIFIKNTPVPANPATTFTAARVDSFITQYSTGQVAVQIEWEIEKERSKRRNPEVQFTSNYGNQSSMLWAPDTTGKYTEPRVIGSRYLTNHL

SEQ ID NO: 4817 - protein, 733 aa, Adeno-associated virus
MAADGYLPDWLEDNLSEGIREWWDLKPGAPKPKANQQKQDDGRGLVLPGYEYLGPFNGLDKGEPVNAADAAALEHDKAYDQQLKAGDNPYLRYNHADAEFQERLQEDTSFGGNLGRAVFQAKKRVLEPLGLVEEGAKTAPGKKRPLESPQEPDSSSGIGKKGKQPAKKRLNFEEDTGAGDGPPEGSDTSAMSSDIEMRAAPGGNAVDAGQGSDGVGNASGDWHCDSTWSEGKVTTTSTRTWVLPTYNNHLYLRLGTTSNSNTYNGFSTPWGYFDFNRFHCHFSPRDWQRLINNNWGLRPKAMRVKIFNIQVKEVTTSNGETTVANNLTSTVQIFADSSYELPYVMDAGQEGSLPPFPNDVFMVPQYGYCGIVTGENQNQTDRNAFYCLEYFPSQMLRTGNNFETAYNFEKVPFHSMYAHSQSLDGLMNPLLDQYLWHLQSTTSGETLNQGNAATTFGKIRSGDFAFYRKNWLPGPCVKQQRFSKTASQNYKIPASGGNALLKYDTHYTLNNRWSNIAPGPPMATAGPSDGDFSNAQLIFPGPSVTGNTTTSANNLLFTSEEEIAATNPRDTDMFGQIADNNQNATTAPITGNVTAMGVLPGMVWQNRDIYYQGPIWAKIPHADGHFHPSPLIGGFGLKHPPPQIFIKNTPVPAYPATTFTAARVDSFITQYSTGQVAVQIEWEIEKERSKRWNPEVQFTSNCGNQSSMLWAPDTTGKYTEPRVIGSRYLTNHL

SEQ ID NO: 4818 - protein, 735 aa, Adeno-associated virus
MAADGYLPDWLEDTLSEGIRQWWKLKPGPPPPKPNQQHRDDSRGLVLPGYKYLGPFNGLDKGEPVNEADAAALEHDKAYDHQLKQGDNPYLKYNHADAEFQERLQEDTSFGGNLGRAVFQAKKRVLEPLGLVEEAVKTAPGKKRPIEQSPAEPDSSSGIGKSGQQPAKKRLNFGQTGDTESVPDPQPIGEPPAAPSGVGSNTMASGGGAPMADNNEGADGVGNSSGNWHCDSTWMGDRVITTSTRTWALPTYNNHLYKQISSESGATNDNHYFGYSTPWGYFDFNRFHCHFSPRDWQRLINNNWGFRPKKLNFKLFNIQVKEVTQNDGTTTIANNLTSTVQVFTDSEYQLPYVLGSAHQGCLPPFPADVFMIPQYGYLTLNNGSQAVGRSSFYCLEYFPSQMLRTGNNFTFSYTFEDVPFHSSYAHSQSLDRLMNPLIDQYLYYLSKTQGTSGTTQQSRLQFSQAGPSSMAQQAKNWLPGPSYRQQRMSKTANDNNNSEFAWTAATKYYLNGRNSLVNPGPPMASHKDDEEKYFPMHGNLIFGKQGTGTTNVDIESVLITDEEEIRTTNPVATEQYGQVATNHQSQNTTASYGSVDSQGILPGMVWQDRDVYLQGPIWAKIPHTDGHFHPSPLMGGFGLKHPPPQILIKNTPVPANPATTFTPGKFASFITQYSTGQVSVEIEWELQKENSKRWNPEIQYTSNYNKSVNVEFTVDANGVYSEPRPIGTRYLTRNL

SEQ ID NO: 4819 - DNA, 3127 bp, Adeno-associated virus
gcggccgcgaattcgcccttcgcagagaccaaagttcaactgaaacgaatcaaccggtttattgattaacatgcaattacagattacgggtgaggtaacgagtgccaatagggcgaggctcagagtaaacaccctggctgtcaacggcaaagtccacaccagtctgcttttcaaagttggaggtgtactgaatctccgggtcccagcgcttgctgttttccttctgcagctcccactcgatttccacgctgacttgtccggtgctgtactgtgtgatgaacgaagcaaacttggcaggagtaaacacctccggaggattagcgggaacgggagtgttcttgatcaggatctgaggaggcggatgtttaagtccaaagccgcccatcaaaggagacgggtgaaagttgccatccgtgtgaggaatcttggcccagatgggaccctgcaggtacacgtcccggttctgccagaccatgccaggtaaggctccctggttgttgacaacttgtgtctgggctgcagtattagccgcttgtaagttgctgctgactatcccgtattcttccgtggctacaggattagtaggacgaatttcttcttcatttgtcattaacacattttccaatgtagttttgttagttgctccagtttttccaaaaatcaggactccgctggatgggaaaaagcggtcctcgtcgtccttgtgagttgccatggcgacgccgggattaaccaacgagtttctgccgttcaggtgatatttggtggcaccagtccaagcaaagttgctgttgttgttttgatccagcgttttggagaccctttgttgccggaagcagggtccaggtaaccaattcttggcttgttcggccatagttgaaggcccgccctggtaaaactgcagttcccgattgccagctgtgcctcctgggtcactctgtgttctggccaggtagtacaagtactggtcgatgaggggattcatcagccggtccaggctctggctgtgtgcgtagctgctgtggaaaggcacgtcctcgaagctgtagctgaactcaaagttgttgcccgttctcagcatctgagaggggaagtactccaggcagtagaaggaggaacgtcccacagactgactgccattgttgagagtcaggtagccgtactgaggaatcatgaagacgtccgccgggaacggaggcaggcagccctggtgcgcagagccgaggacgtacggcagctggtattccgagtccgagaatacctgaatcgtgctggtaaggttattagcgatggtcgtaacgccgtcattcgtcgtgacctccttgacctggatgttgaagagcttgaaccgcagcttcttgggccggaatccccagttgttgttgatgagtcgctgccagtcacgtggtgagaagtggcagtggaatctgttaaagtcaaaatacccccagggggtgctgtagccgaagtaggtgttgtcgttggtactacctgcagtttcactggagatttgctcgtagaggtggttgttgtaggtgggcagggcccaggttcgggtgctggtggtaatgactctgtcgcccagccatgtggaatcgcaatgccaatttcctgaggcattacccactccgtcggcaccttcgttattgtctgccattggtgcgccaccgcctgcagccactgtaccagatcccacactagagggcgctgctggaggttctccgagaggttgagggtcggggactgactctgagtcgccagtctgaccgaaattgagtctctttctggcgggctgctggcccttcttgccgatgcccgtggaggagtcgggggaacgctgaggtgacggctctaccggtctcttctttgcaggagccgtcttagcgccttcctcaaccagaccgagaggttcgagaacccgcttcttggcctggaagactgctcgcccgaggttgcccccaaatgacgtatcttcttgcagacgctcctgaaactcggcgtcggcgtggttataccgcaggtacgggttgtcacccgcattgagctgctggtcgtaggccttgtcgtgctcgagggccgctgcgtccgccgcgttgacgggctcccccttgtcgagtccgttgaagggtccgaggtacttgtagccaggaagcaccagaccccggccgttgtcctgcttttgctggttggctttgggtttcggggctccaggtttcaggtcccaccactcgcgaatgccctcagagaggttgtcctcgagccaatctggaagataaccatcggcagccatacctgatttaaatcatttattgttcaaagatgcagtcatccaaatccacattgaccagatcgcaggcagtgcaagcgtctggcacctttcccatgatatgatgaatgtagcacagtttctgatacgcctttttgacgacagaaacgggtttagattctgacacgggaaagcactctaaacagtctttctgtccgtgagtgaagcagatatttgaattctgattcattctctcgcattgtctgcagggaaacagcatcagattcatgcccacgtgacgagaacatttgttttggtacctgtctgcgtagttgatcgaagcttccgcgtctgacgtcgatggctgcgcaactgactcgcgcacccgtttgggctcacttatatctgcgtcactgggggcgggtcttttcttggctccaccctttttgacgtagaattcatgctccacctcaaccacgtaatcctttgcccaccggaaaaagtctttgacttcctgcttggtgaccttcccaaagtcatgatccagacggcgggtgagttcaaatttgaacatccggtcttgcaacggctgctggtgttcgaaggtcgttgagttcccgtcgatcacggcgcacatgttggtgttggagatgacgatcgcgggagtcgggtctatctgggccgaggacttgcatttctggtccacgcgcaccttgcttcctccgagaatggctttggccgactccacgaccttggcggtcatcttcccctcctcccaccagatcaccatcttgtcgacacagtcgttgaagggaaagttctcattggtccagttgacgcagccgtagaaagggcgaattc

SEQ ID NO: 4820 - DNA, 3106 bp, Adeno-associated virus
gcggccgcgaattcgcccttcgcagagaccaaagttcaactgaaacgaatcaaccggtttattgattaacaagtaattacaggttacgggtgaggtaacgggtgccaatggggcgaggctcagtataaaccccttcgttgttgacagcaaattccacattattagacttggcataatttgaggtgtactgaatctctggattccagcgtttgctgttttctttctgcagttcccactcgatctccacgctgacctggccggtgctgtactgcgtgataaatgaggcaaacttggcaggagtaaacacctctggaggattagcaggtaccggggtgtttttgatgagaatttgaggaggcgggtgtttgagtccaaatccgcccatcaggggagacgggtgaaagttgccgtccgtgtgaggaattttggcccagatgggaccctgcaggcacacgtcccggttctgccagaccatgccgggcagagccccctggctgttgacagtctgtgtctggggtccggccgtagacgattgcaggttgctggagaccacaccgtattcttctgtagccacgggattggtggttttgatctcctcctcgctggtcattagcacgttttccagcgttgtcttgttggcagcccccgttttgccaaaaaccagcactccgttgatgggaaagaactggtcctcgtcgtccttgttggtggccatggctacgcccgggttggttaatgaatttctaccattcagatggtatttagtggccccggtccaggcaaagttactgttgttgttgctgtctatgttttttgacagtctctgctgccgataacagggtccgggcagccagttctttgattgctcggccatggtgttgggcccagcctgatggaactgcagctcccttgtggaccccgtagtgctctgggtccgggccaggtagtacaggtactggtcgatgaggggattcatcagccggtctaggctctggctgtgcacatagctgctgtggaaaggcacttcctcaaaggtgtagctgaattcaaagttattgcccgttctcagcatctgagaaggaaagtactccaggcagtagaaggaggaacgtcccacagactgactgccgttgtttagagtcagatatccgtactgaggaatcatgaacacgtccgcagggaacggagggaggcagccctggtgcgcagagccgaggacgtacggcagttggtactccgagtccgagaagacctgaatcgtgctggtaaggttattagcgatggtcgtaacgccgtcgttcgtcgtgacctccttgacctggatgttgaacaacttgaaccgcagctttctgggccggaatccccagttgttgttgatgagtcgctgccagtcacgtggtgagaagtggcagtggaatctgttgaagtcaaaatagccccagggggtgctgtagctgaagaagtggttgtcgttggtagccccgctctgacttgatatctgcttgtagaggtggttgttgtaggtgggcagggcccaggtgcgggtgctggtggtgatgactctgtcgcccagccatgtggaatcgcaatgccaatttccggaggcattacccactccgtcggcgccttcgttattgtctgccattggtgcgccaccgcctgcagccattgtaccagatcccagacctgagggcgcggcgggaggttctccgagaggttgggggtcgggcactgactctgagtcgccagtctgcccaaagttgagcttctttttagcgggctgctggcctttcttgccgatgcccgtggaggagtcgggggattctatgggtctcttctttccaggagccgtcttagcgacttcctcaaccagaccgagaggttcgagaacccgcttcttggcctggaagactgctcgcccgaggttgcccccaaaagacgtatcttcttgaagacgctcctgaaactcggcgtcggcgtggttgtacttgaggtacgggttgtccccctgctcgagctgcttgtcgtaggccttgtcgtgctcgagggccgcggcgtctgcctcgttgaccggctctcccttgtcgagtccgttgaagggtctgaggtacttgtagccaggaagcaccagaccccggccgtcgtcctgcttttgctggttggctttgggtttcggggctccaggtttcaagtcccaccactcgcgaatgccctcagagaggttgtcctcgagccaatctggaagataaccatcggcagccatacctggtttaagtcatttattgctcagaaacacagtcatccaggtccacgttgaccagatcgcaggccgagcaagcaatctcgggagcccgccccagcagatgatgaatggcacagagtttccgatacgtcctctttctgacgaccggttgagattctgacacgccggggaaacattctgaacagtctctggtcccgtgcgtgaagcaaatgttgaaattctgattcactctctcgcatgtcttgcagggaaacagcatctgaagcatgcccgcgtgacgagaacatttgttttggtacctgtcggcaaagtccaccggagctccttccgcgtctgacgtcgatggattcgcgactgaggggcaggcccgcttgggctcgcttttatccgcgtcatcgggggcgggtctcttgttggccccaccctttctgacgtagaacccatgcgccacctcggtcacgtgatcctgcgcccagcggaagaaccttttgacttcctgctttgtcaccttgccaaagttatgctccagacggcgggtgggttcaaatttgaacatccggtcctgcaacggctgctggtgctcgaaggtggcgctgttcccgtcaatcacggcgcacatgttggtgttggaggtgacggtcacgggggtggggtcgatctgggcggacgacttgcacttttggtccacgcgcaccttgctgccgccgagaatggccttggcggactccacgaccttggccgtcatcttgccctcctcccaccagatcaccatcttgtcggcgcaatcgttgaagggaaagttctcattggtccagttgacgcagccgtagaaagggcgaattc

SEQ ID NO: 4821 - DNA, 3102 bp, Adeno-associated virus
gcggccgcgaattcgcccttcgcagagaccaaagttcaactgaaacgaatcaaccggtttattgattaacaagtaattacaggttacgggtgaggtaacgggtgccaatggggcgaggctcagtataaaccccttcgttgttgacagcaaattccacattattagacttggcataatttgaggtgtactgaatctctggattccagcgtttgctgttttctttctgcagttcccactcgatctccacgctgacctggccggtgctgtactgcgtgataaatgaggcaaacttggcaggagtaaacacctctggaggattagcaggtaccggggtgtttttgatgagaatttgaggaggcgggtgtttgagtccaaatccgcccatcaggggagacgggtgaaagttgccgtccgtgtgaggaatttcggcccagatgggaccctgcaggtacacgtcccggttctgccagaccatgccgggcagagccccctggctgttgacagtctgtgtccggggtccggccgtagacgattgcaggttgctggagaccacaccgtattcttctgtagccacgggattggtggttttgatctcctcctcgctggtcattagcacgttttccagcgttgtcttgttggcagcccccgttttgccaaaaaccagcactccgttgatgggaaggaactggtcctcgtcgtccttgttggtggccatggctacgcccgggttggttaatgaatttctaccattcagatggtatttagtggccccggtccaggcaaagttactgttgttgttgctgtctatgttttttgacagtctctgctgccgataacagggtccgggcagccagttctttgattgctcggccacggtgttgggcccagcctgatggaactgcagctcccttgtggaccccgtagtgctctgggtccgggccaggtagtacaggtactggtcgatgaggggattcatcagccggtccaggctctggctgtgcgcatagctgctgtggaaaggcacttcctcaaaggtgtagctgaattcaaagttattgcccgttctcagcatctgagaaggaaagtactccaggcagcagaaggaggaacgtcccacagactgactgccgttgtttagagtcagatatccgtactgaggaatcatgaacacgtccgcagggaacggagggaggcagccctggtgcgcagagccgaggacgtacggcagttggtactccgagtccgagaagacctgaatcgtgctggtaaggttattagcgatggtcgtaacgccgtcgttcgtcgtgacctccttgacctggatgttgaacaacttgaaccgcagctttctgggccggaatccccagttgttgttgatgagtcgctgccagtcacgtggtgagaagtggcagtggaatctgttgaagtcaaaatagccccagggggtgctgtagccgaagaagtggttgtcgttggtagccccgctctgacttgatatctgcttgtagaggtggttgttgtaggtgggcagggcccaggtgcgggtgctggtggtgatgactctgtcgcccagccatgtggaatcgcaatgccaatttccggaggcattacccactccgtcggcgccttcgttattgtctgccattggtgcgccaccgcctgcagccattgtaccagatcccagacctgagggcgcggcgggaggttctccgagaggttgggggtcgggcactgactctgagtcgccagtctgcccaaagttgagcttctttttagcgggctgctggcctttcttgccgatgcccgtggaggagtcgggggattctatgggtctcttctttccggaagccgtcttagcgccttcctcaaccagaccgagaggttcgagaacccgcttcttggcctggaagactgctcgcccgaggttgcccccaaaagacgtatcttcttgaagacgctcctgaaactcggcgtcggcgtggttgtacttgaggtacgggttgtccccctgctcgagctgcttgtcgtaggccttgtcgtgctcgagggccgcggcgtctgcctcgttgaccggctctcccttgtcgagtccgttgaagggtccgaggtacttgtagccaggaagcaccagaccccggccgtcgtcctgcttttgctggttggctttgggtttcggggctccaggtttcaagtcccaccactcgcgaatgccctcagagaggttgtcctcgagccaatctggaagataaccatcggcagccatacctggtttaagtcatttattgctcagaaacacagtcatccaggtccacgttgaccagatcgcaggccgagcaagcaatctcgggagcccgccccagcagatgatgaatggcacagagtttccgatacgtcctctttctgacgaccggttgagattctgacacgccggggaaacattctgaacagtctctggtcccgtgcgtgaagcaaatgttgaaattctgattcattctctcgcatgtcttgcagggaaacagcatctgaagcatgcccgcgtgacgagaacatttgttttggtacctgtcggcaaagtccaccggagctccttccgcgtctgacgtcgatggatccgcgactgaggggcaagcccgcttgggctcgcttttatccgcgtcatcgggggcgggtctcttgttggctccaccctttctgacgtagaactcatgcgccacctcggtcacgtgatcctgcgcccagcggaagaactctttgacttcctgctttgtcaccttgccaaagtcatgctccagacggcgggtgagttcaaatttgaacatccggtcttgtaacggctgctggtgctcgaaggtggtgctgttcccgtcaatcacggcgcacatgttggtgttggaagtgacgatcacgggggtgggatcgatctgggcggacgacttgcacttttggtccacgcgcaccttgctgccgccgagaatggccttggcggactccacgaccttggccgtcatcttgccctcctcccaccagatcaccatcttgtcgacgcaatcgttgaagggaaagttctcattggtccagttgacgcagccgaagggcgaattc

SEQ ID NO: 4822 - protein, 728 aa, Adeno-associated virus
MAADGYLPDWLEDNLSEGIREWWDLKPGAPKPKANQQKQDDGRGLVLPGYRYLGPFNGLDKGEPVNEADAAALEHDKAYDKQLEQGDNPYLKYNHADAEFQERLQEDTSFGGNLGRAVFQAKKRVLEPLGLVEEGAKTAPGKKRPIESPDSSTGIGKNGQPPAKKKLNFGQTGDSESVPDPQPLGEPPAAPSGLGSGTMAAGGGAPMADNNEGADGVGNASGNWHCDSTWLGDRVITTSTRTWALPTYNNHLYKQISSQSGATNDNHFFGYSTPWGYFDFNRFHCHFSPRDWQRLINNNWGFRPRKLRFKLFNIQVKEVTTNDGVTTIANNLTSTIQVFSDSEYQLPYVLGSAHQGCLPPFPADVFMIPQYGYLTLNNGSQSVGRSSFYCLEYFPSQMLRTGNNFEFSYTFEEVPFHSSYAHSQSLDRLMNPLIDQYLYYLARTQSTTGSTRELQFHQAGPNTMAEQSKNWLPGPCYRQQRLSKNIDSNNNSNFAWTGATKYHLNGRNSLTNPGVAMATNKDDEDQFFPINGVLVFGKTGAANKTTLENVLMTSEEEIKTTNPVATEEYGVVSSNLQSSTAGPQTQTVNSQGALPGMVWQNRDVYLQGPIWAKIPHTDGNFHPSPLMGGFGLKHPPPQILIKNTPVPANPPEVFTPAKFASFITQYSTGQVSVEIEWELQKENSKRWNPEIQYTSNYAKSNNVEFAVNNEGVYTEPRPIGTRYLTRNL

SEQ ID NO: 4823 - DNA, 2187 bp, Adeno-associated virus
atggctgccgatggttatcttccagattggctcgagggcaacctctctgagggcattcgcgagtggtgggacttgaaacctggagccccgaaacccaaagccaaccagcaaaagcaggacgacggccggggtctggtgcttcctggctacaggtacctcggacccttcaacggactcgacaagggagagccggtcaacgaggcagacgccgcggccctcgagcacgacaaggcctacgacaagcagctcgagcagggggacaacccgtacctcaagtacaaccacgccgacgccgagtttcaggagcgtcttcaagaagatacgtcttttgggggcaacctcgggcgagcagtcttccaggccaagaagcgggttctcgaacctctcggtctggttgaggaaggcgctaagacggctcctggaaagaagagacccatagaatcccccgactcctccacgggcatcggcaagaacggccagccgcccgctaaaaagaagctcaactttgggcagactggcgactcagagtcagtgcccgacccccaacctctcggagaacctcccgccgcgccctcaggtctgggatctggtacaatggctgcaggcggtggcgcaccaatggcagacaataacgaaggcgccgacggagtgggtaatgcctccggaaattggcattgcgattccacatggctgggcgacagagtcatcaccaccagcacccgcacctgggccctgcccacctacaacaaccacctctacaagcagatatcaagtcagagcggggctaccaacgacaaccacttcttcggctacagcaccccctggggctattttgacttcaacagattccactgccacttctcaccacgtgactggcagcgactcatcaacaacaactggggattccggcccagaaagctgcggttcaagttgttcaacatccaggtcaaggaggtcacgacgaacgacggcgttacgaccatcgctaataaccttaccagcacgattcaggtcttctcggactcggagtaccaactgccgtacgtcctcggctctgcgcaccagggctgcctccctccgttccctgcggacgtgttcatgattcctcagtacggatatctgactctaaacaacggcagtcagtctgtgggacgttcctccttctactgcctggagtactttccttctcagatgctgagaacgggcgataactttgaattcagctacacctttgaggaagtgcctttccacagcagctatgcgcacagccagagcctggaccggctgatgaatcccctcatcgaccagtacctgtactacctggcccggacccagagcactacggggtccacaagggagctgcagttccatcaggctgggcccaacaccatggccgagcaatcaaagaactggctgcccggaccctgttatcggcagcagagactgtcaaaaaacatagacagcaacaacaacagtaactttgcctggaccggggccactaaataccatctgaatggtagaaattcattaaccaacccgggcgtagccatggccaccaacaaggacgacgaggaccagttctttcccatcaacggagtgctggtttttggcaaaacgggggctgccaacaagacaacgctggaaaacgtgctaatgaccagcgaggaggagatcaaaaccaccaatcccgtggctacagaagaatacggtgtggtctccagcaacctgcaatcgtctacggccggaccccagacacagactgtcaacagccagggggctctgcccggcatggtctggcagaaccgggacgtgtacctgcagggtcccatctgggccaaaattcctcacacggacggcaactttcacccgtctcccctgatgggcggatttggactcaaacacccgcctcctcaaattctcatcaaaaacaccccggtacctgctaatcctccagaggtgtttactcctgccaagtttgcctcatttatcacgcagtacagcaccggccaggtcagcgtggagatcgagtgggaactgcagaaagaaaacagcaaacgctggaatccagagattcagtacacctcaaattatgccaagtctaataatgtggaatttgctgtcaacaacgaaggggtttatactgagcctcgccccattggcacccgttacctcacccgtaacctgtaa

SEQ ID NO: 4824 - protein, 728 aa, Adeno-associated virus; identical to SEQ ID NO: 4803

SEQ ID NO: 4825 - DNA, 3106 bp, Adeno-associated virus
gcggccgcgaattcgcccttcgcagagaccaaagttcaactgaaacgaatcagccggtttattgattaacaagtaattacaggttacgggtgaggtaacgggtgccaatggggcgaggctcagtataaaccccttcgttgttgacagcaaattccacattattagacttggcataatttgaggtgtactgaatctctggattccagcgtttgctgttttctttctgcagttcccactcgatctccacgctgacctggccggtgctgtactgcgtgataaatgaggcaaacttggcaggagtaaacacctctggaggattagcaggtaccggggtgtttttgatgagaatttgaggaggcgggtgtttgagtccaaatccgcccatcaggggagacgggtgaaagttgccgtccgtgtgaggaattttggcccagatgggaccctgcaggtacacgtcccggttctgccagaccatgccgggcagagccccctggctgttgacagtctgtgtctggggtccggccgtagacgattgcaggttgctggagaccacaccgtattcttctgtagccacgggattggtggttttgatctcctcctcgctggtcattagcacgttttccagcgttgtcttgttggcagcccccgttttgccaaaaaccagcactccgttgatgggaaagaactggtcctcgtcgtccttgttggtggccatggctacgcccgggttggttaatgaatttctaccattcagatggtatttagtggccccggtccaggcaaagttactgttgttgttgctgtctatgttttttgacagtctctgctgccgataacagggtccgggcagccagttctttgattgctcggccatggtgttgggcccagcctgatggaactgcagctcccttgtggaccccgtagtgctctgggtccgggccaggtagtacaggtactggtcgatgaggggattcatcagccggtccaggctctggctgtgcgcatagctgctgtggaaaggcacttcctcaaaggtgtagctgaattcaaagttatcgcccgttctcagcatctgagaaggaaagtactccaggcagtagaaggaggaacgtcccacagactgactgccgttgtttagagtcagatatccgtactgaggaatcatgaacacgtccgcagggaacggagggaggcagccctggtgcgcagagccgaggacgtacggcagttggtactccgagtccgagaagacctgaatcgtgctggtaaggttattagcgatggtcgtaacgccgtcgttcgtcgtgacctccttgacctggatgttgaacaacttgaaccgcagctttctgggccggaatccccagttgttgttgatgagtcgctgccagtcacgtggtgagaagtggcagtggaatctgttgaagtcaaaatagccccagggggtgctgtagccgaagaagtggttgtcgttggtagccccgctctgacttgatatctgcttgtagaggtggttgttgtaggtgggcagggcccaggtgcgggtgctggtggtgatgactctgtcgcccagccatgtggaatcgcaatgccaatttccggaggcattacccactccgtcggcgccttcgttattgtctgccattggtgcgccaccgcctgcagccattgtaccagatcccagacctgagggcgcggcgggaggttctccgagaggttgggggtcgggcactgactctgagtcgccagtctgcccaaagttgagcttctttttagcgggcggctggccgttcttgccgatgcccgtggaggagtcgggggattctatgggtctcttctttccaggagccgtcttagcgccttcctcaaccagaccgagaggttcgagaacccgcttcttggcctggaagactgctcgcccgaggttgcccccaaaagacgtatcttcttgaagacgctcctgaaactcggcgtcggcgtggttgtacttgaggtacgggttgtccccctgctcgagctgcttgtcgtaggccttgtcgtgctcgagggccgcggcgtctgcctcgttgaccggctctcccttgtcgagtccgttgaagggtccgaggtacctgtagccaggaagcaccagaccccggccgtcgtcctgcttttgctggttggctttgggtttcggggctccaggtttcaagtcccaccactcgcgaatgccctcagagaggttgccctcgagccaatctggaagataaccatcggcagccatacctggtttaagtcatttattgctcagaaacacagtcatccaggtccacgttggccagatcgcaggccgagcaagcaatctcgggagcccgccccagcagatgatgaatggcacagagtttccgatacgtcctctttctgacgaccggttgagattctgacacgccggggaaacattctgaacagtctctggtcccgtgcgtgaagcaaatgttgaaattctgattcattctctcgcatgtcttgcaggggaacagcatctgaagcatgcccgcgtgacgagaacatttgttttggtacctgtcggcaaagtccaccggagctccttccgcgtctgacgtcgatggatccgcgactgaggggcaggcccgcttgggctcgcttttatccgcgtcatcgggggcgggtctcttgttggctccaccctttctgacgtagaactcatacgccacctcggtcacgtgatcctgcgcccagcggaagaactctttgacttcctgctttgtcaccttgccaaagtcatgctccagacggcgggtgagttcaaatttgaacatccggtcttgtaacggctgctggtgctcgaaggtggtgctgttcccgtcaatcacggcgcacatgttggtgttggaagtgacgatcacgggggtgggatcgatctgggcggacgacttgcacttttggtccacgcgcaccttgctgccgccgagaatggccttggcggactccacgaccttggccgtcatcctgccctcctcccaccagatcaccatcttgtcgacgcaatcgttgaagggaaagttctcattggtccagttgacgcagccgtagaaagggcgaattc

SEQ ID NO: 4826 - protein, 728 aa, Adeno-associated virus
MAADGYLPDWLEDNLSEGIREWWDLKPGAPKPKANQQKQDDGRGLVLPGYRYLGPFNGLDKGEPVNEADAAALEHDKAYDKQLEQGDNPYLKYNHADAEFQERLQEDTSFGGNLGRAVFQAKKRVLEPLGLVEEGAKTAPGKKRPIESPDSSTGIGKNGQPPAKKKLNFGQTGDSESVPDPQPLGEPPAAPSGLGSGTMAAGGGAPMADNNEGADGVGNASGNWHCDSTWLGDRVITTSTRTWALPTYNNHLYKQISSQSGATNDNHFFGYSTPWGYFDFNRFHCHFSPRDWQRLINNNWGFRPRKLRFKLFNIQVKEVTTNDGVTTIANNLTSTIQVFSDSEYQLPYVLGSAHQGCLPPFPADVFMIPQYGYLTLNNGSQSVGRSSFYCLEYFPSQMLRTGDNFEFSYTFEEVPFHSSYAHSQSLDRLMNPLIDQYLYYLARTQSTTGSTRELQFHQAGPNTMAEQSKNWLPGPCYRQQRLSKNIDSNNNSNFAWTGATKYHLNGRNSLTNPGVAMATNKDDEDQFFPINGVLVFGKTGAANKTTLENVLMTSEEEIKTTNPVATEEYGVVSSNLQSSTAGPQTQTVNSQGALPGMVWQNRDVYLQGPIWAKIPHTDGNFHPSPLMGGFGLKHPPPQILIKNTPVPANPPEVFTPAKFASFITQYSTGQVSVEIEWELQKENSKRWNPEIQYTSNYAKSNNVEFAVNNEGVYTEPRPIGTRYLTRNL

SEQ ID NO: 4827 - protein, 728 aa, Adeno-associated virus; identical to SEQ ID NO: 4822

SEQ ID NO: 4828 - protein, 728 aa, Adeno-associated virus
MAADGYLPDWLEDNLSEGIREWWDLKPGAPKPKANQQKQDDGRGLVLPGYKYLGPFNGLDKGEPVNEADAAALEHDKAYDKQLEQGDNPYLKYNHADAEFQERLQEDTSFGGNLGRAVFQAKKRVLEPLGLVEEGAKTAPGKKRPIESPDSSTGIGKNGQPPAKKKLNFGQTGDSESVPDPQPLGEPPAAPSGLGSGTMAAGGGAPMADNNEGADGVGNASGNWHCDSTWLGDRVITTSTRTWALPTYNNHLYKQISSQSGATNDNHFFGYSTPWGYFDFNRFHCHFSPRDWQRLINNNWGFRPRKLRFKLFNIQVKEVTTNDGVTTIANNLTSTIQVFSDSEYQLPYVLGSAHQGCLPPFPADVFMIPQYGYLTLNNGSQSVGRSSFYCLEYFPSQMLRTGNNFEFSYTFEEVPFHSSYAHSQSLDRLMNPLIDQYLYYLARTQSTTGSTRELQFHQAGPNTMAEQSKNWLPGPCYRQQRLSKNIDSNNNSNFAWTGATKYHLNGRNSLTNPGVAMATNKDDEDQFFPINGVLVFGKTGAANKTTLENVLMTSEEEIKTTNPVATEEYGVVSSNLQSSTAGPQTQTVNSQGALPGMVWQNRDVYLQGPIWAKIPHTDGNFHPSPLMGGFGLKHPPPQILIKNTPVPANPPEVFTPAKFASFITQYSTGQVSVEIEWELQKENSKRWNPEIQYTSNYAKSNNVEFAVNNEGVYTEPRPIGTRYLTRNL

SEQ ID NO: 4829 - protein, 728 aa, Adeno-associated virus
MAADGYLPDWLEDNLSEGIREWWDLKPGAPKPKANQQKQDDGRGLVLPGYKYLGPFNGLDKGEPVNEADAAALEHDKAYDKQLEQGDNPYLKYNHADAEFQERLQEDTSFGGNLGRAVFQAKKRVLEPLGLVEEGAKTAPGKKRPIESPDSSTGIGKKGQQPAKKKLNFGQTGDSESVPDPQPLGEPPAAPSGLGSGTMAAGGGAPMADNNEGADGVGNASGNWHCDSTWLGDRVITTSTRTWALPTYNNHLYKQISSQSGATNDNHFFGYSTPWGYFDFNRFHCHFSPRDWQRLINNNWGFRPRKLRFKLFNIQVKEVTTNDGVTTIANNLTSTIQVFSDSEYQLPYVLGSAHQGCLPPFPADVFMIPQYGYLTLNNGSQSVGRSSFYCLEYFPSQMLRTGNNFEFSYTFEEVPFHSSYAHSQSLDRLMNPLIDQYLYYLARTQSTTGSTRELQFHQAGPNTMAEQSKNWLPGPCYRQQRLSKNIDSNNNSNFAWTGATKYHLNGRNSLTNPGVAMATNKDDEDQFFPINGVLVFGKTGAANKTTLENVLMTSEEEIKTTNPVATEEYGVVSSNLQSSTAGPQTQTVNSQGALPGMVWQNRDVYLQGPIWAKIPHTDGNFHPSPLMGGFGLKHPPPQILIKNTPVPANPPEVFTPAKFASFITQYSTGQVSVEIEWELQKENSKRWNPEIQYTSNYAKSNNVEFAVNNEGVYTEPRPIGTRYLTRNL

SEQ ID NO: 4830 - DNA, 3098 bp, Adeno-associated virus
gaattcgcccttcgcagagaccaaagttcaactgaaacgaatcaaccggtttattgattaacaagtaattacaggttacgggtgaggtaacgggtgccaatggggcgaggctcagtataaaccccttcgttgttgacagcaaattccacattattagacttggcataatttgaggtgtactgaatctctggattccagcgtttgctgttttctttctgcagttcccactcgatctccacgctgacctggccggtgctgtactgcgtgataaatgaggcaaactaggcaggagtaaacacccctggaggattagcaggtaccggggtgtttttgatgagaatttgaggaggcgggtgtttgagtccaaatccgcccatcaggggagacgggtgaaagttgccgtccgtgtgaggaattttggcccagatgggaccctgcaggtacacgtcccggttctgccagaccatgccgggcagagccccctggctgttgacagtctgtgtctggggtccggccgtagacgattgcaggttgctggagaccacaccgtattcttctgtagccacgggattggtggttttgatctcctcctcgctggtcattagcacgttttccagcgttgtcttgttggcagcccccgttttgccaaaaaccagcactccgttgatgggaaagaactggccctcgtcgtccttgttggtggccatggctacgcccgggttggttaatgaatttctaccattcagatggtatttagtggccccggtccaggcaaagttactgttgttgttgctgtctatgttttttgacagtctctgctgccgataacagggtccgggcagccagttctttgattgctcggccatggtgttgggcccagcctgatggaactgcagctcccttgtggaccccgtagtgctctgggtccgggccaggtagtacaggtactggtcgatgaggggattcatcagccggtccaggctctggctgtgcgcatagctgctgtggaaaggcacttcctcaaaggtgtagctgaattcaaagttattgcccgttctcagcatctgagaaggaaagtactccaggcagtagaaggaggaacgtcccatagactgactgccgttgtttagagtcagatatccgtactgaggaatcatgaacacgtccgcagggaacggagggaggcagccctggtgcgcagagccgaggacgtacggcagttggtactccgagtccgagaagacctgaatcgtgctggtaaggttattagcgatggtcgtaacgccgtcgttcgtcgtgacctccttgacctggatgttgaacaacttgaaccgcagctttctgggccggaatccccagttgttgttgatgagtcgctgccagtcacgtggtgagaagtggcagtggaatctgttgaagtcaaaatagccccagggggtgctgtagccgaagaagtggttgtcgttggtagccccgctctgacttgatatctgcttgtagaggtggttgttgtaggtgggcagggcccaggtgcgggtgctggtggtgatgactctgtcgcccagccatgtggaatcgcaatgccaatttccggaggcattacccactccgtcggcgccttcgttattgtctgccattggtgcgccaccgcctgcagccattgtaccagatcccagacctgagggcgcggcgggaggttctccgagaggttgggggtcgggcactgactctgagtcgccagtctgcccaaagttgagcttctttttagcgggctgctggcctttcttgccgatgcccgtggaggagtcgggggattctatgggtctcttctttccaggagccgtcttagcgccttcctcaaccagaccgagaggttcgagaacccgcttcttggcctggaagactgctcgcccgaggttgcccccaaaagacgtatcttcttgaagacgctcctgaaactcagcgtcggcgtggttgtacttgaggtacgggttgtccccctgctcgagctgcttgtcgtaggccttgtcgtgctcgagggccgcggcgtctgcctcgttgaccggctctcccttgtcgagtccgttgaagggtccgaggtacttgtagccaggaagcaccagaccccggccgtcgtcctgcttttgctggttggctttgggtttcggggctccaggtttcaagtcccaccactcgcgaatgccctcagagaggttgtcctcgagccaatctggaagataaccatcggcagccatacctggtttaagtcatttattgctcagaaacacagtcatccaggtccacgttgaccagatcgcaggccgagcaagcaatctcgggagcccgccccagcagatgatgaatggcacagagtttccgatacgtcctctttctgacgaccggttgagattctgacacgccggggaaacattctgaacagtctctggtcccgtgcgtgaagcaaatgttgaaattctgattcattctctcgcatgtcttgcagggaaacagcatctgaagcatgcccgcgtgacgagaacatttgttttggtacctgtcggcaaagtccaccggagctccttccgcgtctgacgtcgatggatccgcgactgaggggcaggcccgcttgggctcgcttttatccgcgtcatcgggggcgggcctcttgttggctccaccctttctgacgtagaactcatgcgccacctcggtcacgtgatcctgcgcccagcggaagaactctttgacttcctgctttgtcaccttgccaaagtcctgctccagacggcgggtgagttcaaatttgaacatccggtcttgtaacggctgctggtgctcgaaggtggtgctgttcccgtcaatcacggcgcacatgttggtgttggaagtgacgatcacgggggtgggatcgatctgggcggacgacttgcacttttggtccacgcgcaccttgctgccgccgagaatggccttggcggactccacgaccttggccgtcatcttgccctcctcccaccagatcaccatcttgtcgacgcaatcgttgaagggaaagttctcattggtccagttgacgcagccgtagaaagggcgaattc

SEQ ID NO: 4831 - protein, 729 aa, Adeno-associated virus
MAADGYLPDWLEDNLSEGIREWWDLKPGAPKPKANQQKQDDGRGLVLPGYKYLGPFNGLDKGEPVNAADAAALEHDKAYDQQLKAGDNPYLRYNHADAEFQERLQEDTSFGGNLGRAVFQAKKRVLEPLGLVEEGAKTAPGKKRPIDSPDSSTGIGKKGQQPAKKKLNFGQTGDSESVPDPQPLGEPPAAPSSVGSGTMAAGGGAPMADNNEGADGVGNASGNWHCDSTWLGDRVITTSTRTWALPTYNNHLYKQISSSSSGATNDNHYFGYSTPWGYFDFNRFHCHFSPRDWQRLINNNWGFRPKKLRFKLFNIQVKEVTTNDGVTTIANNLTSTVQVFSDSEYQLPYVLGSAHQGCLPPFPADVFMIPQYGYLTLNNGSQSVGRSSFYCLEYFPSQMLRTGNNFEFSYSFEDVPFHSSYAHSQSLDRLMNPLIDQYLYYLARTQSTTGSTRELQFHQAGPNTMAEQSKNWLPGPCYRQQGLSKNLDFNNNSNFAWTAATKYHLNGRNSLTNPGIPMATNKDDEDQFFPINGVLVFGKTGAANKTTLENVLMTSEEEIKTTNPVATEEYGVVSSNLQPSTAGPQSQTINSQGALPGMVWQNRDVYLQGPIWAKIPHTDGNFHPSPLMGGFGLKHPPPQILIKNTPVPANPPEVFTPAKFASFITQYSTGQVSVEIEWELQKENSKRWNPEIQYTSNYAKSNNVEFAVNPDGVYTEPRPIGTRYLPRNL

SEQ ID NO: 4832 - protein, 1458 aa, Adeno-associated virus
MAADGYLPDWLEDNLSEGIREWWDLKPGAPKPKANQQKQDDGRGLVLPGYKYLGPFNGLDKGEPVNAADAAALEHDKAYDQQLKAGDNPYLRYNHADAEFQERLQEDTSFGGNLGRAVFQAKKRVLEPLGLVEEGAKTAPGKKRPIDSPDSSTGIGKKGQQPAKKKLNFGQTGDSESVPDPQPLGEPPAAPSSVGSGTMAAGGGAPTADNNEGADGVGNASGNWHCDSTWLGDRVITTSTRTWALPTYNNHLYKQISSSSSGATNDNHYFGYSTPWGYFDFNRFHCHFSPRDWQRLINNNWGFRPKKLRFKLFNIQVKEVTTNDGVTTIANNLTSTVQVFSDSEYQLPYVLGSAHQGCLPPFPADVFMIPQYGYLTLNNGSQSVGRSSFYCLEYFPSQMLRTGNNFEFSYSFEDVPFHSSYAHSQSLDRLMNPLIDQYLYYLARTQSTTGSTRELQFHQAGPNTMAEQSKNWLPGPCYRQQRLSKNLDFNNNSNFAWTAATKYHLNGRNSLTNPGIPMATNKDDEDQFFPINGVLVFGKTGAANKTTLENVLMTSEEEIKTTNPVATEEYGVVSSNLQSSTAGPQSQTINSQGALPGMVWQNRDVYLQGPIWAKIPHTDGNFHPSPLMGGFGLEHPPPQILIKNTPVPANPPEVFTPAKFASFITQYSTGQVSVEIEWELQKENSKRWNPEIQYTSNYAKSNNVEFAVNPDGVYTEPRPIGTRYLTRNLMAADGYLPDWLEDNLSEGIREWWDLKPGAPKPKANQQKQDDGRGLVLPGYKYLGPFNGLDKGEPVNAADAAALEHDKAYDQQLKAGDNPYLRYNHADAEFQERLQEDTSFGGNLGRAVFQAKKRVLEPLGLVEEGAKTAPGKKRPIGSPDSSTGIGKKGQQPAKKKLNFGQTGDSESVPDPQPLGEPPAAPSSVGSGTMAAGGGAPMADNNEGADGVGNASGNWHCDSTWLGDRVITTSTRTWALPTYNNHLYKQISSSSSGATNDNHYFGYSTPWGYFDFNRFHCHFSPRDWQRLINNNWGFRPKKLRFKLLNIQVKEVTTNDGVTTIANNLTSTVQVFSDSEYQLPYVLGSAHQGCLPPFPADVFMIPQYGYLTLDNGSQSVGRSSFYCLEYFPSQMLRTGNNFEFSYSFEDVPFHSSYAHSQSLDRLMNPLIDQYLYYLARTQSTTGSTRELQFHQAGPNTMAEQSKNWLPGPCYRQQRLSKNLDFNNNSNFAWTAATKYHLNGRNSLTNPGIPMATNKDDEDQFFPINGVLVFGKTGAANKTTLENVLMTSEEEIKTTNPVATEEYGVVSSNLQSSTAGPQSQTINSQGALPGMVWQNRDVYLQGPIWAKIPHTDGNFHPSPLMGGFGLKHPPPQILIKNTPVPANPPEVFTPAKFASFITQYSTGQVSVEIEWELQKENSKRWNPEIQYTSNYAKSNNVEFAVNPDGVYTEPRPIGTRYLTRNL

SEQ ID NO: 4833 - protein, 729 aa, Adeno-associated virus
MAADGYLPDWLEDNLSEGIREWWDLKPGAPKPKANQQKQDDGRGLVLPGYKYLGPFNGLDKGEPVNAADAAALEHDKAYDQQLKAGDNPYLRYNHADAEFQERLQEDTSFGGNLGRAVFQAKKRVLEPLGLVEEGAKTAPGKKRPIDSPDSSTGIGKKGQQPAKKKLNFGQTGDSESVPDPQPLGEPPAAPSSVGSGTMAAGGGAPTADNNEGADGVGNASGNWHCDSTWLGDRVITTSTRTWALPTYNNHLYKQISSSSSGATNDNHYFGYSTPWGYFDFNRFHCHFSPRDWQRLINNNWGFRPKKLRFKLFNIQVKEVTTNDGVTTIANNLTSTVQVFSDSEYQLPYVLGSAHQGCLPPFPADVFMIPQYGYLTLNNGSQSVGRSSFYCLEYFPSQMLRTGNNFEFSYSFEDVPFHSSYAHSQSLDRLMNPLIDQYLYYLARTQSTTGSTRELQFHQAGPNTMAEQSKNWLPGPCYRQQRLSKNLDFNNNSNFAWTAATKYHLNGRNSLTNPGIPMATNKDDEDQFFPINGVLVFGKTGAANKTTLENVLMTSEEEIKTTNPVATEEYGVVSSNLQSSTAGPQSQTINSQGALPGMVWQNRDVYLQGPIWAKIPHTDGNFHPSPLMGGFGLEHPPPQILIKNTPVPANPPEVFTPAKFASFITQYSTGQVSVEIEWELQKENSKRWNPEIQYTSNYAKSNNVEFAVNPDGVYTEPRPIGTRYLTRNL

SEQ ID NO: 4834 - DNA, 3075 bp, Adeno-associated virus
tgagaactttcctttcaacgattgcgtcggacaagatggtgatctggtgggaggaggggaagatgaccgccaaggtcgtggagtcggccaaagccattcttggaggaagcaaggtgcgtgtggaccagaaatgcaagtcctcggcccagatagacccgactcccgtgatcgtcacctccaacaccaacatgtgcgccgtgattgacgggaactcaacgaccttcgagcaccagcagccgttgcaagaccggatgttcaaatttgaacttacccgccgtctggatcatgactttggaaaggtcaccaagcaggaagtgaaagactttttccggtgggcaaaggatcacgtggttgaggtggagcatgaattctacgtcaaaaagggtggagctaagaaaagacccgcccccagtgacgcagatataagtgagcccaaacgggcgcgcgagtcagttgcgcagccatcaacgtcagacgcggaagcttcgatcaactacgcggacaggtaccaaaaacaaatgttctcgtcacgtgggcatgaatctgatgctgtttccctgcagacaatgcgagagaatgaatcagaattcaaatatctgcttcactcacggacagaaagactgtttagagtgctttcccgtgtcagaatctcaacccgtttctgtcgtcaaaaaggcgtatcagaaactgtgctacattcatcatatcatgggaaaggtgccagacgcttgcactgcctgcgatctggtcaatgtggatttggatgactgcatctctgaacaataaatgatttaaatcaggtatggctgccgatggttatcctccagattggctcgaggacactctctctgaagggataagacagtggtggaagctcaaacctggcccaccaccaccaaagcccgcagagcggcataaggacgacagcaggggtcttgtgcttcctgggtacaagtacctcggacccttcaacggactcgacaagggggagccggtcaacgaggcagacgccgcggccctcgagcacgacaaggcctacgaccggcagctcgacagcggagacaacccgtacctcaagtacaaccacgccgacgcagagtttcaggagcgccttaaagaagatacgtcttttgggggcaacctcggacgagcagtcttccaggcgaaaaagagggttcttgaacctctgggcctggttgaggaacctgttaagacggctccgggaaaaaagaggccggtagagcactctcctgtggagccagactcctcctcgggaaccggaaaagcgggccagcggcctgcaagaaaaagattaaattttggtcagactggagacgcagactccgtacctgacccccagcctctcggacagccaccagcagccccctctggtctgggatctactacaatggctacaggcagtggcgcaccaatggcagacaataacgagggtgccgatggagtgggtaattcctcaggaaattggcattgcgattcccaatggctgggcgacagagtcatcaccaccagcacccgaacctgggccctgcccacatacaacaaccacctctacaagcaaatctccagccaatcaggagccagcaacgacaaccactactttggctacagcaccccctgggggtattttgacttcaacagattccactgccacttttcaccacgtgactggcaaagactcatcaacaacaactggggattccggcccaaaagactcaacttcaagctctttaatattcaagtcaaagaggtcacgcagaatgacggtacgacgacgattgccaataaccttaccagcacggttcaggtgtttactgactcggagtaccagctcccgtacgtcctgggctcggcgcatcaaggatgcctcccgccgtttccagcggacgtcttcatggtcccacagtatggatacctcaccctgaacaacgggagtcaggcggtaggacgctcttccttttactgcctggagtactttccttctcagatgctgcgtactggaaacaactttcagttcagctacacttttgaagacgtgcctttccacagcagctacgctcacagccagagtctggatcggctgatgaatcctctgatcgaccagtacctgtattatctgaacaagacacaaacaaatagtggaactcttcagcagtctcggctactgtttagccaagctggaccaaccaacatgtctcttcaagctaaaaactggctgcctggaccttgctacagacagcagcgtctgtcaaaacaggcaaacgacaacaacaacagcaactttccctggactgcagctacaaagtatcatctaaatggccgggactcgttggttaatccaggaccagctatggccagtcacaaggatgacgaagaaaagtttttccccatgcatggaaccctgatatttggtaaacaaggaacaaatgccaacgacgcggatttggaaaatgtcatgattacagatgaagaagaaatcagggccaccaatcccgtggctacggagcagtacgggactgtgtcaaataatttgcaaaactcaaacactggtccaactactggaactgtcaatcgccaaggagcgttacctggtatggtgtggcaggatcgagacgtgtacctgcagggacccatttgggccaagattcctcacaccgatggacactttcatccttctccactgatgggaggttttggactcaaacacccgcctcctcagatcatgatcaaaaacactcccgttccagccaatcctcccacaaacttcagttctgccaagtttgcttctttcatcacacagtattccacgggacaggtcagcgtggagatcgagtgggagctgcagaaggagaacagcaaacgctggaatcccgaaattcagtacacttccaactacaacaagtctgttaatgtggactttactgtggacactaatggtgtgtattcagagcctcgccccattggcaccagatacctgactcgtaatctgtaattgcttgttaatcaataaaccgtttaattcgtttcagttgaactttggtctctgcgaagggcgaa

SEQ ID NO: 4835 - DNA, 3142 bp, Adeno-associated virus
aaaacgacgggccagtgattgtaatacgactcactatagggcgaaattgaaattagcggccgcgaattcgcctttcgcagagaccaaagttcaactgaaacgaattaaacggtttattgattaacaagcaattacagattacgagtcaggtatctggtgccaatggggcgaggctctgaatacacaccattagtgtccacagtaaagtccacattaacagacttgttgtagttggaagtgtactgaatttcgggattccagcgtttgctgttctccttctgcagctcccactcgatctccacgctgacctgtcccgtggaatactgtgtgatgaaagaagcaaacttggcagaactgaagtttgtgggaggattggctggaacgggagtgtttttgatcatgatctgaggaggcgggtgtttgagtccaaaacctcccatcagtggagaaggatgaaagtgtccatcggtgtgaggaatcttggcccaaatgggtccctgcaggtacacgtctcgatcctgccacaccataccaggtaacgctccttggtgattgacagttccagtagttggaccagtgtttgagttttgcaaattatttgacacagtcccgtactgctccgtagccacgggattggtggccctgatttcttcttcatctgtaatcatgacattttccaaatccgcgtcgttggcatttgttccttgtttaccaaatatcagggttccatgcatggggaaaaacttttcttcgtcatccttgtgactggccatagctggtcctggattaaccaacgagtcccggccatttagatgatactttgtagctgcagtccagggaaagttgctgttgttgttgtcgtttgcctgttttgacagacgctgctgtctgtagcaaggtccaggcagccagtttttagcttgaagagacatgttggttggtccagcttggctaaacagtagccgagactgctgaagagttccactatttgtttgtgtcttgttcagataatacaggtactggtcgatcagaggattcatcagccgatccagactctggctgtgagcgtagctgctgtggaaaggcacgtcttcaaaagtgtagctgaactgaaagttgtttccagtacgcagcatctgagaaggaaagtactccaggcagtaaaaggaagagcgtcctaccgcctgactcccgttgttcagggtgaggtatccatactgtgggaccatgaagacgtccgctggaaacggcgggaggcatccttgatgcgccgagcccaggacgtacgggagctggtactccgagtcagtaaacacctgaaccgtgctggtaaggttattggcaatcgtcgtcgtaccgtcattctgcgtgacctctttgacttgaatattaaagagcttgaagttgagtcttttgggccggaatccccggttgttgttgacgagtctttgccagtcacgtggtgaaaagtggcagtggaatctgttgaagtcaaaatacccccagggggtgctgtagccaaagtagtggttgtcgttgctggctcctgattggctggagatttgcttgtagaggtggttgttgtatgtgggcagggcccaggttcgggtgctggtggtgatgactctgtcgcccagccattgggaatcgcaatgccaatttcctgaggaattacccactccatcggcaccctcgttattgtctgccattggtgcgccactgcctgtagccattgtagtagatcccagaccagagggggctgctggtggctgtccgagaggctgggggtcaggtacggagtctgcgtctccagtctgaccaaaatttaatctttttcttgcaggctgctggcccgcttttccggttcccgaggaggagtctggctccacaggagagtgctctaccggcctcttttttcccggagccgtcttaacaggctcctcaaccaggcccagaggttcaagaaccctctttttcgcctggaagactgctcgtccgaggttgcccccaaaagacgtatcttctttaaggcgctcctgaaactctgcgtcggcgtggttgtacttgaggtacgggttgtctccgctgtcgagctgccggtcgtaggccttgtcgtgctcgagggccgcggcgtctgcctcgttgaccggctcccccttgtcgagtccgttgaagggtccgaggtacttgtacccaggaagcacaagacccctgctgtcgtccttatgccgctctgcgggctttggtggtggtgggccaggtttgagcttccaccactgtcttattccttcagagagagtgtcctcgagccaatctggaagataaccatcggcagccatacctgatttaaatcatttattgttcagagatgcagtcatccaaatccacattgaccagatcgcaggcagtgcaagcgtctggcacctttcccatgatatgatgaatgtagcacagtttctgatacgcctttttgacgacagaaacgggttgagattctgacacgggaaagcactctaaacagtctttctgtccgtgagtgaagcagatatttgaattctgattcattctctcgcattgtctgcagggaaacagcatcagattcatgcccacgtgacgagaacatttgttttggtacctgtccgcgtagttgatcgaagcttccgcgtctgacgtcgatggctgcgcaactgactcgcgcgcccgtttgggctcacttatatctgcgtcactgggggcgggtcttttcttagctccaccctttttgacgtagaattcatgctccacctcaaccacgtgatcctttgcccaccggaaaaagtctttcacttcctgcttggtgacctttccaaagtcatgatccagacggcgggtaagttcaaatttgaacatccggtcttgcaacggctgctggtgctcgaaggtcgttgagttcccgtcaatcacggcgcacatgttggtgttggaggtgacgatcacgggagtcgggtctatctgggccgaggacttgcatttctggtccacacgcaccttgcttcctccaagaatggctttggccgactccacgaccttggcggtcatcttcccctcctcccaccagatcaccatcttgtcgacgcaatggtaaaaggaaagttctcattgg

SEQ ID NO: 4836 - DNA, 2208 bp, Adeno-associated virus
atggctgccgatggttatcttccagattggctcgaggacactctctctgaaggaataagacagtggtggaagctcaaacctggcccaccaccaccaaagcccgcagagcggcataaggacgacagcaggggtcttgtgcttcctgggtacaagtacctcggacccttcaacggactcgacaagggggagccggtcaacgaggcagacgccgcggccctcgagcacgacaaggcctacgaccggcagctcgacagcggagacaacccgtacctcaagtacaaccacgccgacgcagagtttcaggagcgccttaaagaagatacgtcttttgggggcaacctcggacgagcagtcttccaggcgaaaaagagggttcttgaacctctgggcctggttgaggaacctgttaagacggctccgggaaaaaagaggccggtagagcactctcctgtggagccagactcctcctcgggaaccggaaaagcgggccagcagcctgcaagaaaaagattaaattttggtcagactggagacgcagactccgtacctgacccccagcctctcggacagccaccagcagccccctctggtctgggatctactacaatggctacaggcagtggcgcaccaatggcagacaataacgagggtgccgatggagtgggtaattcctcaggaaattggcattgcgattcccaatggctgggcgacagagtcatcaccaccagcacccgaacctgggccctgcccacatacaacaaccacctctacaagcaaatctccagccaatcaggagccagcaacgacaaccactactttggctacagcaccccctgggggtattttgacttcaacagattccactgccacttttcaccacgtgactggcaaagactcatcaacaacaactggggattccggcccaaaagactcaacttcaagctctttaatattcaagtcaaagaggtcacgcagaatggcggtacgacgacgattgccaataaccttaccagcacggttcaggtgtttactgactcggagtaccagctcccgtacgtcctgggctcggcgcatcaaggatgcctcccgccgtttccagcggacgtcttcatggtcccacagtatggatacctcaccctgaacaacgggagtcaggcggtaggacgctcttccttttactgcctggagtactttccttctcagatgctgcgtactggaaacaactttcagttcagctacacttttgaagacgtgcctttccacagcagctacgctcacagccagagtctggatcggctgatgaatcctctgatcgaccagtacctgtattatctgaacaagacacaaacaaatagtggaactcttcagcagtctcggctactgtttagccaagctggaccaaccaacatgtctcttcaagctaaaaactggctgcctggaccttgctacagacagcagcgtctgtcaaaacaggcaaacggcaacaacaacagcaactttccctggactgcagctacaaagtatcatctaaatggccgggactcgttggttaatccaggaccagctatggccagtcacaaggatgacgaagaaaagtttttccccatgcatggaaccctgatatttggtaaacaaggaacaaatgccaacgacgcggatttggaaaatgtcatgattacagatgaagaagaaatcagggccaccaatcccgtggctacggagcagtacgggactgtgtcaaataatttgcaaaactcaaacactggtccaactactggaactgtcaatcaccaaggagcgttacctggtatggtgtggcaggatcgagacgtgtacctgcagggacccatttgggccaagattcctcacaccgatggacactttcatccttctccactgacgggaggttttggactcaaacacccgcctcctcagatcatgatcaaaaacactcccgttccagccaatcctcccacaaacttcagttctgccaagtttgcttctttcatcacacagtattccacgggacaggtcagcgtggagatcgagtgggagctgcagaaggagaacagcaaacgctggaatcccgaaattcagtacacttccaactacaacaagtctgttaatgtggactttactgtggacactaatggtgtgtattcagagcctcgccccattggcaccagatacctgactcgtaatctgtaa

SEQ ID NO: 4837 - protein, 735 aa, Adeno-associated virus
MAADGYLPDWLEDTLSEGIRQWWKLKPGPPPPKPAERHKDDSRGLVLPGYKYLGPFNGLDKGEPVNEADAAALEHDKAYDRQLDSGDNPYLKYNHADAEFQERLKEDTSFGGNLGRAVFQAKKRVLEPLGLVEEPVKTAPGKKRPVEHSPVEPDSSSGTGKAGQQPARKRLNFGQTGDADSVPDPQPLGQPPAAPSGLGSTTMATGSGAPMADNNEGADGVGNSSGNWHCDSQWLGDRVITTSTRTWALPTYNNHLYKQISSQSGASNDNHYFGYSTPWGYFDFNRFHCHFSPRDWQRLINNNWGFRPKRLNFKLFNIQVKEVTQNGGTTTIANNLTSTVQVFTDSEYQLPYVLGSAHQGCLPPFPADVFMVPQYGYLTLNNGSQAVGRSSFYCLEYFPSQMLRTGNNFQFSYTFEDVPFHSSYAHSQSLDRLMNPLIDQYLYYLNKTQTNSGTLQQSRLLFSQAGPTNMSLQAKNWLPGPCYRQQRLSKQANGNNNSNFPWTAATKYHLNGRDSLVNPGPAMASHKDDEEKFFPMHGTLIFGKQGTNANDADLENVMITDEEEIRATNPVATEQYGTVSNNLQNSNTGPTTGTVNHQGALPGMVWQDRDVYLQGPIWAKIPHTDGHFHPSPLTGGFGLKHPPPQIMIKNTPVPANPPTNFSSAKFASFITQYSTGQVSVEIEWELQKENSKRWNPEIQYTSNYNKSVNVDFTVDTNGVYSEPRPIGTRYLTRNL

SEQ ID NO: 4838 - DNA, 2208 bp, Adeno-associated virus
atggctgccgatggttatcttccagattggctcgaggacactctctctgaaggaataagacagtggtggaagctcaaacctggcccaccaccaccaaagctcgcagagcggcatcaggacgacagcaggggtcttgtgcttcctgggtacaagtacctcggacccttcaacggactcgacaaaggagagccggtcaacgaggcagacgccgcggccctcgagcacgacaaggcctacgaccggcagctcgacagcggagacaacccgtacctcaagtacaaccacgccgacgcggagtttcaggagcgtcttaaagaagatacgtcttttgggggcaacctcggacgagcagtcttccaggcgaaaaagagggttcttgaacctctgggcctggttgaggaacctgttaagacggctccgggaaaaaagaggccggtagagcactctcctgtggagccagactcctcctcgggaaccggaaaggcgggccatcagcctgcgagaaagagattgaattttggtcagactggagacgcagactccgtacctgacccccagcctctcggacagccaccagcagcccccacaagtctgggatctactacaatggctacaggcagtggcgcaccaatggcagacaataacgagggtgccgatggagtgggtaattcctcaggaaattggcattgcgattcccaatggctgggcgacagagtcatcaccaccagcacccgaacctgggccctgcccacctacaacaaccacctctacaagcaaatctccagccaatcaggagcctcgaacgacaaccactactttggctacagcaccccctgggggtattttgacttcaacagattccactgtcacttctccccacgtgattggcaaagactcatcaacaacaactggggattccgacccaagagactcaacttcaagctctttaacattcaagtcaaagaggtcacgcagaatgacggtacgacgacgattgccaataaccttaccagcacggttcaggtgtttactgactcggagtaccagctcccgtacgtcctcggctcggcgcatcaaggatgcctcccgccgtttccagcggacgtcttcacggtcccacagtatggatacctcaccctgaacaacgggagtcaggcggtaggacgctcttccttttactgcctggagtactttccttctcagatgctgcgtactggaaacaaccttaccttcagctacacctttgaggacgttcctttccacagcagctacgctcacagccagagtttggaccggctgatgaatcctctgatcgaccagtatctatattatctgaacaggacacaatcaaatagtggaactcttcagcagtctaggctactgtttagccaagctggacccaccagcatgtctcttcaagctaaaaactggctgcctggaccttgctacagacagcagcgtctttcaaagcaggcaaacgacaacaacaacagcaactttccctggactgcggctacaaagtatcatctaaatggccgggactcgttggttaatccaggaccagctatggccagccacaaagacgatgaagaaaagtttttccccatgcatggaaccctgatatttggtaaacaaggaacaaatgctaacgacgcggatttggagcatgttatgattacagatgaagaagaaatcaggaccaccaatcctgtggctacagagcagtacggaaacgtgtcaaataatttgcaaaactcaaatactggtccaactacagaaaatgtcaatcaccagggagcgttacctggtatggtgtggcaggatcgagacgtgtacctgcagggacccatttgggccaagattcctcacaccgacggacactttcacccttctccactgatgggaggttttggactcaaacacccgcctcctcaaatcatgatcaaaaacactcccgttccagccaatcctcccacaaactacagttctgccaagtttgcttctttcatcacacagtattccacgggccaggtcagcgtggagattgagtgggagctgcggaaggagaacagcaaacgctggaaccccgagatccagtatacttccaactacaacaaatctgttaatgtggactttactgtggacactaatggtgtgtattcagagcctcgccccattggcaccagatacctgactcgtaatctgtaa

SEQ ID NO: 4839 - protein, 735 aa, Adeno-associated virus
MAADGYLPDWLEDTLSEGIRQWWKLKPGPPPPKLAERHQDDSRGLVLPGYKYLGPFNGLDKGEPVNEADAAALEHDKAYDRQLDSGDNPYLKYNHADAEFQERLKEDTSFGGNLGRAVFQAKKRVLEPLGLVEEPVKTAPGKKRPVEHSPVEPDSSSGTGKAGHQPARKRLNFGQTGDADSVPDPQPLGQPPAAPTSLGSTTMATGSGAPMADNNEGADGVGNSSGNWHCDSQWLGDRVITTSTRTWALPTYNNHLYKQISSQSGASNDNHYFGYSTPWGYFDFNRFHCHFSPRDWQRLINNNWGFRPKRLNFKLFNIQVKEVTQNDGTTTIANNLTSTVQVFTDSEYQLPYVLGSAHQGCLPPFPADVFTVPQYGYLTLNNGSQAVGRSSFYCLEYFPSQMLRTGNNLTFSYTFEDVPFHSSYAHSQSLDRLMNPLIDQYLYYLNRTQSNSGTLQQSRLLFSQAGPTSMSLQAKNWLPGPCYRQQRLSKQANDNNNSNFPWTAATKYHLNGRDSLVNPGPAMASHKDDEEKFFPMHGTLIFGKQGTNANDADLEHVMITDEEEIRTTNPVATEQYGNVSNNLQNSNTGPTTENVNHQGALPGMVWQDRDVYLQGPIWAKIPHTDGHFHPSPLMGGFGLKHPPPQIMIKNTPVPANPPTNYSSAKFASFITQYSTGQVSVEIEWELRKENSKRWNPEIQYTSNYNKSVNVDFTVDTNGVYSEPRPIGTRYLTRNL

SEQ ID NO: 4840 - DNA, 2208 bp, Adeno-associated virus
atggctgccgatggttatcttccagattggctcgaggacactctctctgaaggaataagacagtggtggaagctcaaacctggcccaccaccaccaaagcccgcagagcggcatcaggacgacagcaggggtcttgtgcttcctgggtacaagtacctcggacccttcaacggactcgacaaaggagagccggtcaacgaggcagacgccgcggccctcgagcacgacaaggcctacgaccggcagctcgacagcggagacaacccgtacctcaagtacaaccacgccgacgcggagtttcaggagcgtcttaaagaagatacgtcttttgggggcaacctcggacgagcagtcttccaggcgaaaaagagggttcttgaacctctgggcctggttgaggaacctgttaagacggctccgggaaaaaagaggccggtagagcactctcctgtggagccagactcctcctcgggaaccggaaaagcgggccatcagcctgcgagaaagagattgaattttggtcagactggagacgcagactccgtacctgacccccagcctctcggacagccaccagcagcccccacaagtttgggatctactacaatggctacaggcagtggcgcaccaatggcagacaataacgagggtgccgatggagtgggtaattcctcaggaaattggcattgcgattcccaatggctgggcgacagagtcatcaccaccagcacccgaacctgggccctgcccacctacaacaaccacctctacaagcaaatctccagccaatcaggagcctcgaacgacaaccactactttggctacagcaccccctgggggtattttgacttcaacagattccactgtcacttctccccacgtgattggcaaagactcatcaacaacaactggggattccgacccaagagactcaacttcaagctctttaacattcaagtcaaggaggtcacgcagaatgacggtacgacgacgattgccaataaccttaccagcacggttcaggtgtttactgactcggagtaccagctcccgtacgtcctcggctcggcgcatcaaggatgcctcccgccgtttccagcggacgtcttcatggtcccacagtatggatacctcaccctgaacaacgggagtcaggcggtaggacgctcttccttttactgcctggagtactttccttctcagatgctgcgtactggaaacaactttaccttcagctacacctttgaggacgttcctttccacagcagctacgctcacagccagagtttggaccggctgatgaatcctctgatcgaccagtatctatattatctgaacaggacacaatcaaatagtggaactcttcagcagtctaggctactgtttagccaagctggacccaccagcatgtctcttcaagctaaaaactggctgcctggaccttgctacagacagcagcgtctttcaaagcaggcaaacgacaacaacaacagcaactttccctggactgcggctacaaagtatcgtctaaatggccgggactcgttggttaatccaggaccagctatggccagccacaaagacgatgaagaaaagtttttccccatgcatggaaccctgatatttggtaaacaaggaacaaatgctaacgacgcggatttggagcatgttatgattacagatgaagaagaaatcaggaccaccaatcctgtggctacagagcagtacggaaacgtgtcaaataatttgcaaaactcaaatactggtccaactacagaaaatgtcaatcaccagggagcgttacctggtatggtgtggcaggatcgagacgtgtacctgcagggacccatttgggccaagattcctcacaccgacggacactttcacccttctccactgatgggaggttttggactcaaacacccgcctcctcaaatcatgatcaaaaacactcccgttccagccaatcctcccacaaacttcagttctgccaagtttgcttctttcatcacacagtattccacgggccaggtcagcgtggagattgagtgggagctgcagaaggagaacagcaaacgctggaaccccgagatccagtatacttccaactacaacaaatctgttaatgtggactttactgtggacactaatggtgtgtattcagagcctcgccccattggcaccagatacctgactcgtaatctgtaa

SEQ ID NO: 4841 - protein, 735 aa, Adeno-associated virus
MAADGYLPDWLEDTLSEGIRQWWKLKPGPPPPKPAERHQDDSRGLVLPGYKYLGPFNGLDKGEPVNEADAAALEHDKAYDRQLDSGDNPYLKYNHADAEFQERLKEDTSFGGNLGRAVFQAKKRVLEPLGLVEEPVKTAPGKKRPVEHSPVEPDSSSGTGKAGHQPARKRLNFGQTGDADSVPDPQPLGQPPAAPTSLGSTTMATGSGAPMADNNEGADGVGNSSGNWHCDSQWLGDRVITTSTRTWALPTYNNHLYKQISSQSGASNDNHYFGYSTPWGYFDFNRFHCHFSPRDWQRLINNNWGFRPKRLNFKLFNIQVKEVTQNDGTTTIANNLTSTVQVFTDSEYQLPYVLGSAHQGCLPPFPADVFMVPQYGYLTLNNGSQAVGRSSFYCLEYFPSQMLRTGNNFTFSYTFEDVPFHSSYAHSQSLDRLMNPLIDQYLYYLNRTQSNSGTLQQSRLLFSQAGPTSMSLQAKNWLPGPCYRQQRLSKQANDNNNSNFPWTAATKYRLNGRDSLVNPGPAMASHKDDEEKFFPMHGTLIFGKQGTNANDADLEHVMITDEEEIRTTNPVATEQYGNVSNNLQNSNTGPTTENVNHQGALPGMVWQDRDVYLQGPIWAKIPHTDGHFHPSPLMGGFGLKHPPPQIMIKNTPVPANPPTNFSSAKFASFITQYSTGQVSVEIEWELQKENSKRWNPEIQYTSNYNKSVNVDFTVDTNGVYSEPRPIGTRYLTRNL

SEQ ID NO: 4842 - DNA, 2208 bp, Adeno-associated virus
atggctgccgatggttatcttccagattggctcgaggacactctctctgaaggaataagacagtggtggaagctcaaacctggcccaccaccaccaaagcccgcagagcggcatcaggacgacagcaggggtcttgtgcttcctgggtacaagtacctcggacccttcaacggactcgacaaaggagagccggtcaacgaggcagacgccgcggccctcgagcacgacaaggcctacgaccggcagctcgacagcggagacaacccgtacctcaagtacaaccacgccgacgcggagtttcaggagcgtcttaaagaagatacgtcttttgggggcaacctcggacgagcagtcttccaggcgaaaaagagggttcttgaacctctgggcctggttgaggaacctgttaagacggctccgggaaaaaagaggccggtagagcactctcctgtggagccagactcctcctcgggaaccggaaaagcgggccatcagcctgcgagaaagagattgaattttggtcagactggagacgcagactccgtacctgacccccagcctctcggacagccaccagcagcccccacaagtttgggatctactacaatggctacaggcagtggcgcaccaatggcagacaataacgagggtgccgatggagtgggtaattcctcaggaaattggcattgcgattcccaatggctgggcgacagagtcatcaccaccagcacccgaacctgggccctgcccacctacaacaaccacctctacaagcaaatctccagccaatcaggagcctcgaacgacaaccactactttggctacagcaccccctgggggtattttgacttcaacagattccactgtcacttctccccacgtgattggcaaagactcatcaacaacaactggggattccgacccaagagactcaacttcaagctctttaacattcaagtcaaagaggtcacgcagaatgacggtacgacgacgattgccaataaccttaccagcacggttcaggtgtttactgactcggagtaccagctcccgtacgtcctcggctcggcgcatcaaggatgcctcccgccgtttccagcggacgtcttcatggtcccacagtatggatacctcaccctgaacaacgggagtcaggcggtaggacgcccttccttttactgcctggagtactttccttctcagatgctgcgtactggaaacaactttaccttcagctacacctttgaggacgttcctttccacagcagctacgctcacagccagagtttggaccggctgatgaatcctctgatcgaccagtatctatattatctgaacaggacacaatcaaatagtggaactcttcagcagtctaggctactgtttagccaagctggacccaccagcatgtctcttcaagctaaaaactggctgcctggaccttgctacagacagcagcgtctttcaaagcaggcaaacgacaacaacaacagcaactttccctggactgcggctacaaagtatcatctaaatggccgggactcgttggttaatccaggaccagctatggccagccacaaagacgatgaagaaaagtttttccccatgcatgggaccctgatatttggtaaacaaggaacaaatgctaacgacgcggatttggagcatgttatgattacagatgaagaagaaatcaggaccaccaatcctgtggctacagagcagtacggaaacgtgtcaaataatttgcaaaactcaaatactggtccaactacagaaaatgtcaatcaccagggagcgttacctggtatggtgtggcaggatcgagacgtgtacctgcagggacccatttgggccaagattcctcacaccgacggacactttcacccttctccactgatgggaggttttggactcaaacacccgcctcctcaaatcatgatcaaaaacactcccgttccagccaatcctcccacaaacttcagttctgccaagtttgcttctttcatcacacagtattccacgggccaggtcagcgtggagattgagtgggagctgcagaaggagaacagcaaacgctggaaccccgagatccagtatacttccaactacaacaaatctgttaatgtggactttactgtggacactaatggtgtgtattcagagcctcgccccattggcaccagatacctgactcgtaatctgtaa

SEQ ID NO: 4843 - protein, 735 aa, Adeno-associated virus
MAADGYLPDWLEDTLSEGIRQWWKLKPGPPPPKPAERHQDDSRGLVLPGYKYLGPFNGLDKGEPVNEADAAALEHDKAYDRQLDSGDNPYLKYNHADAEFQERLKEDTSFGGNLGRAVFQAKKRVLEPLGLVEEPVKTAPGKKRPVEHSPVEPDSSSGTGKAGHQPARKRLNFGQTGDADSVPDPQPLGQPPAAPTSLGSTTMATGSGAPMADNNEGADGVGNSSGNWHCDSQWLGDRVITTSTRTWALPTYNNHLYKQISSQSGASNDNHYFGYSTPWGYFDFNRFHCHFSPRDWQRLINNNWGFRPKRLNFKLFNIQVKEVTQNDGTTTIANNLTSTVQVFTDSEYQLPYVLGSAHQGCLPPFPADVFMVPQYGYLTLNNGSQAVGRPSFYCLEYFPSQMLRTGNNFTFSYTFEDVPFHSSYAHSQSLDRLMNPLIDQYLYYLNRTQSNSGTLQQSRLLFSQAGPTSMSLQAKNWLPGPCYRQQRLSKQANDNNNSNFPWTAATKYHLNGRDSLVNPGPAMASHKDDEEKFFPMHGTLIFGKQGTNANDADLEHVMITDEEEIRTTNPVATEQYGNVSNNLQNSNTGPTTENVNHQGALPGMVWQDRDVYLQGPIWAKIPHTDGHFHPSPLMGGFGLKHPPPQIMIKNTPVPANPPTNFSSAKFASFITQYSTGQVSVEIEWELQKENSKRWNPEIQYTSNYNKSVNVDFTVDTNGVYSEPRPIGTRYLTRNL

SEQ ID NO: 4844 - DNA, 2208 bp, Adeno-associated virus
atggctgccgatggttatcttccagattggctcgaggacactctctctgaaggaataagacagtggtggaagctcaaacctggcccaccaccaccaaagcccgcagagcggcataaggacgacagcaggggtcttgtgcttcctgggtacaagtacctcggacccttcaacggactcgacaagggagagccggtcaacgaggcagacgccgcggccctcgagcacgacaaggcctacgaccggcagctcgacagcggagacaacccgtacctcaagtacaaccacgccgacgcggagtttcaggagcgccttaaagaagatacgtcttttgggggcaacctcggacgagcagtcttccaggcaaaaaagagggttcttgaacctctgggcctggttgaggagcctgttaaaacggctccgggaaaaaagaggccggtagagcactctcctgcggagccagactcctcctcgggaaccggaaaagcgggccagcagcctgcaagaaaaagattgaatttcggtcagactggagacgcagactccgtacctgacccccagcctctcggacagccaccagcagccccctctggtctgggaactaatacgatggcttcaggcagtggcgcaccaatggcagacaataacgagggcgccgacggagtgggtaattcctcgggaaattggcattgcgattccacatggatgggcgacagagtcatcaccaccagcacccgaacttgggccctgcccacctacaacaaccatctctacaagcaaatctccagccaatcaggagccagcaacgacaaccactactttggctacagcaccccttgggggtattttgacttcaacagattccactgccacttttcaccacgtgactggcaaagactcatcaacaacaactggggattccggcccaagagactcaacttcaagctctttaacattcaagtcaaagaggtcacgcagaatgacggtacgacgacgattgccaataaccttaccagcacggttcaggtgtttactgactcggagtaccagctcccgtacgtcctcggctcggcgcatcaaggatgcctcccgccgttcccagcagacgtcttcatggtgccacagtatggatacctcaccctgaacaacgggagtcaggcagtaggacgctcttcattttactgcctggagtactttccttctcagatgctgcgtaccggaaacaactttaccttcagctacacctttgaggacgttcctttccacagcagctacgctcacagccagagtttggaccgtctcatgaatcctctcatcgaccagtacctgtattacttgagcagaacaaacactccaagcggaaccaccacgcagtccaggcttcagttttctcaggccggagcaagtgacattcgggaccagtctaggaactggcttcctggaccctgttaccgccagcagcgagtatcaaagacatctgcggataacaacaacagtgaatactcgtggactggagctaccaagtaccacctcaatggcagagactctctggtgaatccgggcccggccatggccagccacaaggacgatgaagaaaagttttttcctcagagcggggttctcatctttgggaagcaaggctcagagaaaacaaatgtggacattgaaaaggtcatgattacagacgaagaggaaatcaggaccaccaatcccgtggctacggagcagtatggttctgtatctaccaacctgcagggcggcaacacacaagcagctaccgcagatgtcaacacacaaggcgttcttccaggcatggtctggcaggacagagacgtgtacctgcaggggcccatctgggcaaagattccacacacggacggacattttcacccctctcccctcatgggcggattcggacttaaacaccctcctccacagattctcatcaagaacaccccggtacctgcgaatccttcgaccaccttcagtgcggcaaagtttgcttctttcatcacacagtattccacggggcaggtcagcgtggagatcgagtgggagctgcagaaggagaacagcaaacgctggaatcccgagatccagtacacttccaactacaacaaatctgttaatgtggactttactgttgacactaatggcgtgtattcagagcctcgccccattggcaccagatacctgactcgtaatctgtaa

SEQ ID NO: 4845 - protein, 735 aa, Adeno-associated virus
MAADGYLPDWLEDTLSEGIRQWWKLKPGPPPPKPAERHKDDSRGLVLPGYKYLGPFNGLDKGEPVNEADAAALEHDKAYDRQLDSGDNPYLKYNHADAEFQERLKEDTSFGGNLGRAVFQAKKRVLEPLGLVEEPVKTAPGKKRPVEHSPAEPDSSSGTGKAGQQPARKRLNFGQTGDADSVPDPQPLGQPPAAPSGLGTNTMASGSGAPMADNNEGADGVGNSSGNWHCDSTWMGDRVITTSTRTWALPTYNNHLYKQISSQSGASNDNHYFGYSTPWGYFDFNRFHCHFSPRDWQRLINNNWGFRPKRLNFKLFNIQVKEVTQNDGTTTIANNLTSTVQVFTDSEYQLPYVLGSAHQGCLPPFPADVFMVPQYGYLTLNNGSQAVGRSSFYCLEYFPSQMLRTGNNFTFSYTFEDVPFHSSYAHSQSLDRLMNPLIDQYLYYLSRTNTPSGTTTQSRLQFSQAGASDIRDQSRNWLPGPCYRQQRVSKTSADNNNSEYSWTGATKYHLNGRDSLVNPGPAMASHKDDEEKFFPQSGVLIFGKQGSEKTNVDIEKVMITDEEEIRTTNPVATEQYGSVSTNLQGGNTQAATADVNTQGVLPGMVWQDRDVYLQGPIWAKIPHTDGHFHPSPLMGGFGLKHPPPQILIKNTPVPANPSTTFSAAKFASFITQYSTGQVSVEIEWELQKENSKRWNPEIQYTSNYNKSVNVDFTVDTNGVYSEPRPIGTRYLTRNL

SEQ ID NO: 4846 - DNA, 3161 bp, Adeno-associated virus
gattgaatttagcggccgcgaattcgcccttgctgcgtcaactggaccaatgagaactttccattcaatgattgcgtcgacaagatggtgatctggtgggaggagggaaagatgaccgccaaggtcatggagtcggccaaagccattctcggaggaagcaaggtgcgcgtggaccagaaatgtaagtcctcggcccagatagacccgactcccgtgattgtcacctccaacaccaacatgtgcgccgtgattgacgggaactcaacgaccttcgagcaccagcagccgttgcaagaccggatgttcaaatttgaactcacccgccgtctggatcatgactttgggaaggtcaccaagcaggaagtcaaagactttttccggtgggcaaaggatcacgtggttgaggtggagcatgaattctacgtcaaaaagggtggagccaagaaaagacccgcccccagtgacgcagatataagtgagcccaaacgggcgcgcgggtcagttgcgcagccatcgacgtcagacgcggaagcttcgatcaactacgcggacaggtaccaaaacaaatgttctcgtcacgtgggcatgaatctgatgctgtttccctgcagacaatgcgagagaatgaatcaaaattcaaatatctgcttcactcacggacagaaggactgtttagagtgctttcccgtgtcagaatctcaacccgtttctgtcgtcaaaaaggcgtatcagaaactttgctacattcatcatatcatgggaaaggtgccagacgcttgcactgcctgcgatctggtcaatgtggatttggatgactgcatctctgaacaataaatgatttaaatcaggtatggctgccgatggttatcttccagattggctcaaggacactctctctgaaggaataagacagtggtggaagctcaaacctggcccaccaccaccaaagcccgcagagcggcataaggacgacagcgggggtcttgtgcttcctgggtacaagtacctcggacccttcaacggactcgacaagggagagccggtcaacgaggcagacgccgcggccctcgagtacgacaaggcctacgaccggcagctcgacagcggagacaacccgtacctcaagtacaaccacgccgacgcggagtttcaggagcgccttaaagaagatacgtcttttgggggcaacctcggacgagcagtcttccaggcgaaaaagagggttcttgaacctctgggcctggttgaggaacctgttaagacggctccgggaaaaaagaggccggtagagcactctcctgtggagccagactcctcctcgggaacaggaaaagcgggccagcagcctgcgagaaagagattgaattttggtcagactggagacgcagactccgtacctgacccccagcctctcggacagccaccagcagccccctctggtctgggaactaatacgatggctacaggcagtggcgcaccaatggcagacaataacgagggcgccgacggagtgggtaattcctcgggaagttggcattgcgattccacatggatgggcgacagagtcatcaccaccagcacccgaacctgggctctgcccacctacaacaaccatctgtacaagcagatctccagccaatcaggagccagcaacgacaaccactactttggctacagcaccccttgggggtattttgacttcaacagattccactgccacttttcaccacgtgactggcaaagactcatcaacaacaactggggattccggcccaagagactcaacttcaagctctttaacattcaagtcaaggaggtcacgcagaatgacggtacgacgacgattgccaataaccttaccagcacggttcaggtgtttactgactcggagtaccagctcccgtacgtccccggctcggcgcatcaaggatgcctcccgccgttcccagcagacgtcttcatggtgccacagtatggatacctcaccctgaacaacgggagtcaggcagtaggacgctcttcattttactgcctggagtactttccttctcagatgcttcgtaccggaaacaactttaccttcagctacacctttgaggatgttcctttccacagcagctacgctcacagccagagtttggaccgtctcatgaatcctctcatcgaccagtacctgtattacttgagcagaacaaacactccaagcggaaccaccacgcagtccaggcttcagttttctcaggccggagcaagtgacattcgggaccagtctaggaactggcttcctggaccctgttaccgccagcagcgagtatcaaagacagctgcggacaacaacaacagtgaatactcgtggactggagctaccaagtaccacctcaatggcagagactctctggtgaatccgggcccggccatggccagccacaaggacgatgaagaaaagttttttcctcaaagcggggttctcatctttgggaagcaaggctcagagaaaacaaatgtggacattgaaaaggtcatgattacagacgaagaggaaatcagaaccaccaatcccgtggccacggagcagtatggttctgtatctaccaacctccagagcggcaacacacaagcagctactgcagatgtcaacacacaaggcgttcttccaggcatggtctggcaggacagagacgtgcacctgcaggggcctatctgggcaaagattccacacacggacggacattttcacccctctcccctcatgggcggatttggacttaaacaccctcctccacagattctcatcaagaacaccccggtacctgcaaatccttcgaccaccttcagtgcggcaaagtttgcttccttcatcacacagtattccacagggcaggtcagcgtggagatcgagtgggagctgcagaaggagaacagcaaacgctggaaccccgagatccagtacacttccaactacaacaaatctgttaatgtggactttactgtggacactaatggtgtgtattcagagcctcgccccattggcaccagatacctgactcgtaatctgtaattgcttgttaatcaataaaccgtttaattcgtttcagttgaactttggtctctgcgaagggcgaattcgtttaaaccctgcaggactagtccctttagtgagg

SEQ ID NO: 4847 - DNA, 3162 bp, Adeno-associated virus
gaattgaatttagcggccgcgaattcgcccttcgcagagaccaaagttcaactgaaacgaattaaacggtttattgattaacaagcaattacagattacgagtcaggtatctggtgccaatggggcgaggctctgaatacacgccattagtgtccacagtaaagtccacattaacagacttgttgtagttggaagtgtactgaatttcgggattccagcgtttgctgttttccttctgcagctcccactcgatctccacgctgacctgtcccgtggagtactgtgtgatgaaggaagcaaactttgccgcactgaaggtggtcgaaggattcgcaggtaccggggtgttcttgatgagaatctgtggaggagggtgtttaagtccgaatccacccatgaggggagaggggtgaaaatgtccgtccgtgtgtggaatctttgcccagatgggcccctgaaggtacacatctctgtcctgccagaccatgcctggaagaacgccttgtgtgttgacatctgcggtagctgcttgtctgttgcctctctggaggttggtagatacagaaccgtactgctccgtagccacgggattggttgtcctgatttcctcttcgtctgtaatcatgaccttttcaatgtccacatttgttttctctgagccttgcttcccaaagatgagaaccccgctctgaggaaaaaacttttcttcattgtccttgtggcttgccatggccgggcccggattcaccagagagtctctgccattgaggtggtacttggtagctccagtccacgagtattcactgttgttgttatccgcagatgtctttgatactcgctgctggcggtaacagggtccaggaagccagttcctagactggtcccgaatgtcactcgctccggcctgagaaaactgaagccttgactgcgtggtggttccacttggagtgtttgttgtgctcaagtaatacaggtactggtcgatgagaggattcatgagacggtccagactctggctgtgagcgtagccgctgtggaaaggaacgtcctcaaaagtgtagctgaaggtaaagttgtttccggtacgcagcatctgagaaggaaagtactccaggcagtaaaatgaagagcgtcctactgcctgactcccgttgttcagggtgaggtatccatactgtggcaccatgaagacgtctgctgggaacggcgggaggcatccttgatgcgccgagccgaggacgtacgggagctggtactccgagtcagtaaacacctgaaccgtgctggtaaggttattggcaatcgtcgtcgtaccgtcattctgcgtgacctctttgacttgaatgttaaagagcttgaagttgagtctcttgggtcggaatccccagttgttgttgatgagtctttgccagtcacgtggtgaaaagtggcagtggaatctgttgaagtcaaaatacccccaaggggtgctgtagccaaagtagtgattgtcgttcgaggctcctgattggctggaaatttgtttgtagaggtggttgttgtaggtgggcagggcccaggttcgggtgctggtggtgatgactctgtcgcccatccatgtggaatcgcaatgccaatttcccgaggaattacccactccgtcggcgccctcgttattgtctgccattggtgcgccactgcctgtagccatcgtattagttcccagaccagagggggctgctggtggctgtccgagaggctgggggtcaggtactgagtctgcgtctccagtctgaccaaaattcaatctttttcttgcaggctgctggcccgcctttccggttcccgaggaggagtctggctccacaggagagtgctctaccggcctcttttttcctggagccgtcttgacaggttccccaaccaggcccagaggttcaagaaccctctttttcgcctggaagactgctcgtccgaggttgcccccaaaagacgtatcttctttaaggcgctcctgaaactccgcgtcggcgtggttgtacttgaggtacgggttgtctccgctgtcgagctgccggtcgtaggctttgtcgtgctcgagggccgcggcgtctgcctcgttgaccggctctcccttgtcgagtccgttgaagggtccgaggtacttgtacccaggaagcacaagacccctgctgtcgtccttatgccgctctgcgggctttggtggtggtgggccaggtttgagcttccaccactgtcttattccttcagagagagtgtcctcgagccaatctggaagataaccatcggcagccatacctgatttaaatcatttattgttcaaagatgcagtcatccaaatccacattgaccagatcgcaggcagtgcaagcgtctggcacctttcccatgatatgatgaatgtagcacagtttctgatacgcctttttgacgacagaaacgggttgagattctgacacgggaaagcactctaaacagtctttctgtccgtgagtgaagcagatatttgaattctgattcattctctcgcattgtctgcagggaaacagcatcagattcatgcccacgtgacgagaacatttgttttggtacctgtctgcgtagttgatcgaagcttccgcgtctgacgtcgatggctgcgcaactgactcgcgcacccgtttgggctcacttatatctgcgtcactgggggcgggtcttttcttggctccaccctttttgacgtagaattcatgctccacctcaaccacgtgatcctttgcccaccggaaaaagtctttgacttcctgcttggtgaccttcccaaagtcatgatccagacggcgggtgagttcaaatttgaacatccggtcttgcaacggctgctggtgttcgaaggtcgttgagttcccgtcaatcacggcgcacatgttggtgttggaggtgacgatcacgggagtcgggtctatctgggccgaggacttgcatttctggtccacgcgcaccttgcttcctccgagaatggctttggccgactccacgaccttggcggtcatcttcccctcctcccaccagatcaccatcttgtcgacacagtcgttgaagggaaagttctcattggtccagttgacgcagcaagggcgaattcgtttaaacctgcaggactagtccctttagtgaggg

SEQ ID NO: 4848 - DNA, 3164 bp, Adeno-associated virus
gcgaattgaatttagcggccgcgaattcgcccttcgcagagaccaaagttcaactgaaacgaattaaacggtttattgattaacaagcaattacaaattacgagtcaggtatctggtgccaatggggcgaggctctgaatacacgccattagtgtccacagtaaagtccacattaacagacttgttgtagttggaagtgtactgaatttcgggattccagcgtttgctgttttccttctgcagctcccactcgatctccacgctgacctgtcccgtggagtactgtgtgatgaaggaagcaaactttgccgcactgaaggtggtcgaaggattcgcaggtaccggggtgttcttgatgagaatctgtggaggagggtgtttaggtccgaatccacccatgaggggagaggggtgaaaatgtccgtccgtgtgtggaatctttgcccagatgggcccctgaaggtacacatctctgtcctgccagaccatgcctggaagaacgccttgtgtgttgacatctgcggtagctgcttgtctgttgcctctctggaggttggtagatacagaaccatactgctccgtagccacgggattggttgtcctgatttcctcttcgtctgtaatcatgaccttttcaatgtccacatttgttttctctgagccttgcttcccaaagatgagaaccccgctctgaggaaaaaacttttcttcattgtccttgtggcttgccatggccgggcccggattcaccagagagtctctgccattgaggtggtacttggtagctccagtccacgagtattcactgttgttgttatccgcagatgtctttgatactcgctgctggcggtaacagggtccaggaagccagttcctagactggtcccgaatgtcactcgctccggcctgagaaaactgaagccttgactgcgtggtggttccacttggagtgtttgttgtgctcaagtaatacaggtactggtcgatgagaggattcatgagacggtccagactctggctgtgagcgtagctgctgtggaaaggaacgtcctcaaaagtgtagctgaaggtaaagttgtttccggtacgcagcatctgagaaggaaagtactccgggcagtaaaatgaagagcgtcctactgcctgactcccgttgctcagggtgaggtatccatactgtggcaccatgaagacgtctgctgggaacggcgggaggcatccttgatgcgccgagccgaggacgtacgggagctggtactccgagtcagtaaacacctgaaccgtgctggtaaggttattggcaatcgtcgtcgtaccgtcattctgcgtgacctctttgacttgaatgttaaagagcttgaagttgagtctcttgggtcggaatccccagttgttgttgatgagtctttgccagtcacgtggtgaaaagtggcagtggaatctgttgaagtcaaaatacccccaaggggtgctgtagccaaagtagtgattgtcgttcgaggctcctgattggctggaaatttgtctgtagaggtggttgttgtaggtgggcagggcccaggttcgggtgctggtggtgatgactctgtcgcccatccatgtggaatcgcaatgccgatttcccgaggaattacccactccgtcggcgccctcgttattgtctgccattggtgcgccactgcctgtagccatcgtattagttcccagaccagagggggctgctggtggctgtccgagaggctgggggtcaggtactgagtctgcgtctccagtctgaccaaaattcaatctttttcttgcaggctgctggcccgcctttccggttcccgaggaggagtctggctccacaggagagtgctctaccggcctcttttttcccggagccgtcttaacaggttccccaaccaggcccagaggttcaagaaccctctttttcgcctggaagactgctcgtccgaggttgcccccaaaagacgtatcttctttaaggcgctcctgaaactccgcgtcggcgtggttgtacttgaggtacgggttgtctccgctgtcgagctgccggtcgtaggctttgtcgtgctcgagggccgcggcgtctgcctcgttgaccggctctcccttgtcgagtccgttgaagggtccgaggtacttgtacccaggaagcacaagacccctgctgtcgtccttatgccgctctgcgggctttggtggtggtgggccaggtttgagcttccaccactgtcttattccttcagagagagtgtcctcgagccaatctggaagataaccatcggcagccatacctgatttaaatcatttattgttcaaagatgcagtcatccaaatccacattgaccagatcgcaggcagtgcaagcgtctggcacctttcccatgatatgatgaatgtagcacagtttctgatacgcctttttgacgacagaaacgggttgagattctgacacgggaaagcactctaaacagtctttctgtccgtgagtgaagcagatatttgaattctgattcattctctcgcattgtctgcagggaaacagcatcagattcatgcccacgtgacgagaacatttgttttggtacctgtctgcgtagttgatcgaagcttccgcgtctgacgtcgatggctgcgcaactgactcgcgcacccgtttgggcccacttatatctgcgtcactgggggcgggtcttttcttggctccaccctttttgacgtagaattcatgctccacctcaaccacgtgatcctttgcccaccggaaaaagtctttgacttcctgcttggtgaccttcccaaagtcatgatccagacggcgggtgagttcaaatttgaacatccggtcttgcaacggctgctggtgttcgaaggtcgttgagttcccgtcaatcacggcgcacatgttggtgttggaggtgacgatcacgggagtcgggtctatctgggccgaggacttgcatttctggtccacgcgcaccttgcttcctccgagaatggctttggccgactccacgaccttggcggtcatcttcccctcctcccaccagatcaccatcttgtcgacacagtcgttgaagggaaagttctcattggtccagttgacgcagcaagggcgaattcgtttaaacctgcaggactagtccctttagtgaggg

SEQ ID NO: 4849 - DNA, 3163 bp, Adeno-associated virus
accctcactaaagggactagtcctgcaggtttaaacgaattcgcccttgctgcgtcaactggagcaatgagaactttcccttcaacgactgtgtcgacaagatggtgatttggtgggaggaggggaagatgaccgccaaggtcgtggagtcggccaaagccattctcggaggaagcaaggtgcgcgtggaccagaaatgcaagtcctcggcccagatagatccgactcccgtgatcgtcacctccaacaccaacatgtgcgccgtgattgacgggaactcaacgaccttcgaacaccagcagccgttgcaagaccggatgttcaaatttgaactcacccgccgtctggatcatgactttgggaaggtcaccaagcaggaagtcaaagactttttccggtgggcaaaggatcacgtggttgaggtggagcatggattctacgtcaaaaagggtggagccaagaaaagacccgcccctagtgacgcagatataagtgagcccaaacgggtgcgcgagtcagttgcgcagccatcgacgtcggacgcggaagcttcgatcaactacgcggacaggtaccaaaacaaatgttctcgtcacgtgggcatgaatctgatgctgtttccctgcagacaatgcgagagaatgaatcaaaattcaaatatctgcttcactcacggacagaaagactgtttagagtgctttcccgtgtcagaatctcaacctgtttctgtcgtcaaaaaggcgtatcagaaactgcgctacattcatcatatcatgggaaaggtgccagacgcttgcactgcctgcgatctggtcaatgtggatttggatgactgcatctctgaacaataaatgatttaaatcaggtatggctgccgatggttatcttccagattggctcgaggacactctctctgaaggaataagacagtggtggaagctcaaacctggcccaccaccaccaaagcccgcagagcggcataaggacgacagcaggggtcttgtgcttcctgggtacaagtacctcggacccttcaacggactcgacaagggagagccggtcaacgaggcagacgccgcggccctcgagcacgacaaggcctacgaccggcagctcgacagcggagacaacccgtacctcaagtacaaccacgccgacgcggagtttcaggagcgtcttaaagaagatacgtcttttgggggcaacctcggacgagcagtcttccaggcgaaaaagagggttcttgaacctctgggcctggttgaggaacctgttaagacggctccgggaaaaaagaggccggtagagcactctcctgcggagccagactcctcctcgggaaccggaaaagcgggccagcagcctgcaagaaaaagactgaatttcggtcagactggagacgcagactccgtacctgacccccagcctctcggacagccaccagcagcccccacaagtttgggatctactacaatggctacaggcagtggcgcaccaatggcagacaataacgagggtgccgatggagtgggtaattcctcaggaaattggcattgcgattcccaatggctgggcgacagagtcatcaccaccagcacccgaacctgggccctgcccacctacaacaaccacctttacaagcaaatctccagccaatcaggagcctcaaacgacaaccactactttggctacagcaccccctgggggtattttgacttcaacagattccactgccacttttcaccacgtgactggcaaagactcatcaacaacaactggggattccgacccaagagactcaacttcaagctctttaacattcaagtcaaagaggtcacgcagaatgacggtacgacgacgattgccaataaccttaccagcacggttcaggtgtttactgactcggagtaccagctcccgtacgtcctcggctcggcgcatcaaggatgcctcccgccgtttccagcggacgtcttcatggtcccacagtatggatacctcaccctgaacaacgggagtcaggcggtaggacgctcttccttttactgcctggagtgctttccttctcagatgctgcgtactggaaacaactttcagttcagctacacttttgaagacgtgcctttccacagcagctacgctcacagccagagtttggatcggctgatgaatcctctgatcgaccagtacctgtattatctaaacagaacacaaacagctagtggaactcagcagtctcggctactgtttagccaagctggacccacaagcatgtctcttcaagctaaaaactggctgcctggaccgtgttatcgccagcagcgtttgtcaaagcaggcaaacgacaacaacaacagcaactttccctggactggagctaccaagtaccacctcaatggcagagactctttggtgaacccgggcccggccatggccagccacaaggacgatgaagaaaagtttttccccatgcatggaaccctaatatttggtaaagaaggaacaaatgctaccaacgcggaattggaaaatgtcatgattacagatgaagaggaaatcaggaccaccaatcccgtggctacagagcagtacggatatgtgtcaaataatttgcaaaactcaaatactgctgcaagtactgaaactgtgaatcaccaaggagcattacctggtatggtgtggcaggatcgagacgtgtacctgcagggacccatttgggccaagattcctcacaccgatggacactttcatccttctccactgatgggaggttttggactcaaacacccgcctcctcagattatgatcaaaaacactcccgttccagccaatcctcccacaaacttcagttctgccaagtttgcttccttcatcacacagtattccacgggacaggtcagcgtggagatcgagtgggagctgcagaaggagaacagcaaacgctggaatcccgaaattcagtacacttccaactacaacaaatctgttaatgtggactttactgtggacactaatggtgtgtattcagagcctcgccccattggcaccagatacctgactcgtaatctgtaattgcttgttaatcaataaaccgtttaattcgtttcagttgaactttggtctctgcgaagggcgaattcgcggccgctaaattcaattcgcc

SEQ ID NO: 4850 - protein, 735 aa, Adeno-associated virus
MAADGYLPDWLEDTLSEGIRQWWKLKPGPPPPKPAERHKDDSRGLVLPGYKYLGPFNGLYKGEPVDEADAAALEHDKAYDRQLDSGDNPYLKYNHADAEFQERLKEDTSFGGNLGRAVFQAKKRVLEPLGLVGEPVKTAPGKKRPVEHSPVEPDSSSGTGKAGNQPARKRLNFGQTGDADSVPDPQPLGQPPAAPSGLGSTTMATGSGAPVADNNEGADGVGNSSGNWHCDSQWLGDRVITTSTRTWALPTYNNHLYKQISSQSGASNDNHYFGYSTPWGYFDFNRFHCHFSPRDRQRLINNNWGFRPKRLNFKLFNIQVKEVTQNDGTTTIANNLTSTVQVFTDSGYQLPYVLGLAHQGCLPPFPADVFMVPQYGYLTLNNGSQAVGRSSFYCLEYFPSQMLRTGNNFQFSYTFEDVPFHSSYAHSQSLDRLMNPLIDQYLYYLNKTQSNSGTLQQSRLLFSQAGPTSMSLQAKNWLPGPCYRQQRLSKQANDNNNSNFPWTAATKYHLNGRDSLVNPGPAMASHKDDEEKFFPMHGTLIFGKQGTNANDADLDNVMITDEEEIRTTNPVATEQYGYVSNNLQNSNTGPTTGTVNHQGALPGMVWQDRDVYLQGPIWAKIPHTDGHFHPSPLMGGFGLKHPPPQIMIKNTPVPANPPTNFSSAKFASFITQYSTGQVSVEIEWELQKEDSKRWNPEIQYTSNYNKPVNVDFTVDTNGVYSEPRPIGTRYLTRNL

SEQ ID NO: 4851 - DNA, 2208 bp, Adeno-associated virus
atggctgccgatggttatcttccagattggctcgaggacactctctctgaaggaataagacagtggtggaagctcaaacctggcccaccaccaccaaagcccgcagagcggcataaggacgacagcaggggtcttgtgcttcctgggtacaagtacctcggacccttcaacggactctacaagggagagccggtcgacgaggcagacgccgcggccctcgagcacgacaaggcctacgaccggcagctcgacagcggagacaacccgtacctcaagtacaaccacgccgacgcggagtttcaggagcgccttaaagaagatacgtcttttgggggcaacctcggacgagcagtcttccaggccaaaaagagggttcttgaacctctgggcttggttggggagcctgttaaaacggctccgggaaaaaagaggccggtagagcactctcctgtggagccagactcctcctcgggaaccggaaaagcgggcaaccagcctgcaagaaaaagattgaattttggtcagactggagacgcagactccgtacctgacccccagcctctcggacagccaccagcagccccctctggtctgggatctactacaatggctacaggcagtggcgcaccagtggcagacaataacgagggtgccgatggagtgggtaattcctcaggaaattggcattgcgattcccaatggctgggcgacagagtcatcaccaccagcacccgaacctgggctctgcccacctacaataaccacctctacaagcaaatctccagccaatcaggagcctcaaacgacaaccactactttggctacagcaccccctgggggtattttgacttcaacagattccactgccacttttcaccacgtgaccggcaaagactcatcaacaacaactggggattccgaccaaaaagactcaacttcaagctctttaacattcaagtcaaagaggtcacgcagaatgacggtacgacgacgattgccaataaccttaccagcacggttcaggtgtttactgactcggggtaccagctcccgtacgtcctcggcttggcgcatcaaggatgcctcccgccgttcccagcagacgtcttcatggtgccacagtatggatacctcaccctgaacaacgggagtcaggcggtaggacgctcttccttttactgcctggagtactttccttctcagatgctgcgtactggaaacaactttcagttcagctacacctttgaagacgttcctttccacagcagctacgctcacagccagagtctggatcggctgatgaatcctctgatcgaccagtacctgtattatctgaacaagacacaatcaaatagtggaactcttcagcagtctcggctactgtttagccaagctggacccaccagcatgtctcttcaagctaaaaactggctgcctggaccttgctacagacagcagcgtctgtcaaagcaggcaaacgacaacaacaacagcaactttccctggactgcggctacaaagtatcatctaaatggccgggactcgttggttaatccaggaccagctatggccagccacaaagacgatgaagaaaagtttttccccatgcatggaaccctgatatttggtaaacaaggaacaaatgctaacgacgcggatttggacaatgtcatgattacagatgaagaagaaatccgcaccaccaatcccgtggctacggagcagtacggatatgtgtcaaataatttgcaaaactcaaatactggtccaactactggaactgtcaatcaccaaggagcgttacctggtatggtgtggcaggatcgagacgtgtacctgcagggacccatttgggccaagattcctcacaccgatggacactttcatccttctccacttatgggaggttttggactcaaacacccacctcctcagatcatgattaaaaacactcccgttccagccaatcctcccacaaacttcagttctgccaagtttgcttctttcatcacacagtattccacgggacaagtcagcgtggagatcgagtgggagctgcagaaggaggacagcaaacgctggaaccccgagatccagtacacttccaactataacaaacctgttaatgtggactttactgtggacactaatggtgtgtattcagagcctcgccccattggcaccagatacctgactcgtaatctgtaa

SEQ ID NO: 4852 - DNA, 3161 bp, Adeno-associated virus
cgaattgatttagcggccgcgaattcgcccttcgcagagaccaaagttcaactgaaacgaattaaacggtttattgattaacaagcaattacagattacgagtcaggtatctggtgccaatggggcgaggctctgaatacacaccattagtgtccacagtaaagtccacattaacagatttgttgtagttggaagtgtactggatctcgggattccagcgtttgctgttctccttctgtagctcccactcgatctccacgctgacccgccccgtggaatactgtgtgatgaaggaagcaaactttgccgcactgaaggtggtcgaaggattcgcaggtaccggggtgtttttgatgagaatctgtggaggagggtgtttaagtccgaatccgcccatgaggggagaggggtgaaaatgtccgtccgtgtgcggaatctttgcccagataggcccctgcaggtacacgtctctgtcctgccagaccatgcctggaagaacgccttgtgtgttgacatctgcagtagatgcttgtgtgttgccgctctggaggttggtagatacagaaccatactgctccgtggccacgggattggtggttctgatttcctcttcgtctgtaatcatgaccttttcaatgtccacatttgttttctctgatccttgttttccaaagatgagaaccccgctctgaggaaaaaacttttcttcatcgtccttgtggctggccattgccgggcccggattcaccagagagtctctgccattgaggtggtacttggtagctccaatccacgagtattcactgttgttgttgtccgcagatgtctttgatactcgctgctggcggtaacagggtccaggaagccagttcctagactgatcccgaatgtcactcgctccggcctgagaaaactgaagcctggactgcgtggtggttccgcttggagtgtttgttctgctcaagtaatacaggtactggtcgatgagaggattcatgagacggtccaaactctggctgtgagcgtagctgctgtggaaaggaacatcctcaaaggtgtagctgaaggtaaagttgtttccggtacgcagcatctgagaagggaagtactccaggcagtaaaatgaagagcgtcctactgcctgactcccgttgttcagggtgaggtatccatactgtggcaccatgaagacgtctgctgggaacggcgggaggcatccttgatgcgccgagccgaggacgtacgggagctggtactccgagtcagtaaacacctgaaccgtgctggtaaggttattggcaatcgtcgtcgtaccatcattctgcgtgacctctctgacttgaatgttaaagagcttgaagttgagtctcttgggccggaatccccagttgttgttgatgagtctttgccagtcacgtggtgaaaagtggcagtggaatctgttgaagtcaaaatacccccaaggggtgctgtagccaaagtagtggttgtcgttgctggctcctgattggctggaaatctgcttgtacagatggttgttgtaggtgggcagagcccaggttcgggtgctggtggtgatgactctgtcgcccatccatgtggaatcgcaatgccaatttcccgaggaattacccactccgtcggcgccatcgttattgtctgccattggtgcgccactgcctgtagccatcgtattagttcccagaccagagggggctgctggtggctgtccgagaggctgggggtcaggtacggagtctgcgtctccagtctgaccgaaattcaatctctttcttgcaggctggttgcccgcttttccggttcccgaggaggagtctggctccacaggagagtgctctaccggcctcttttttcccggagccgtcttaacaggctcctcaaccaggcccagaggttcaagaaccctcttttttgcctggaagactgctcgtccgaggttgcccccaaaagacgtatcttctttaaggcgctcctgaaactccgcgtcggcgtggtcgtacttgaggtacgggttgtctccgctgtcgagctgccggtcgtaggccttgtcgtgctcgagggccgcggcgtctgcctcgttgaccggctctcccttgtcgagtccgttgaagggtccgaggtacttgtacccaggaagcacaagacccctgctgtcgtccttatgccgctctgcgggctttggtggtggtgggccaggtttgagcttccaccactgtcttattccttcagagagagtgtcctcgagccaatctggaagataaccatcggcagccatacctgatttaaatcatttattgttcagagatgcagtcatccaaatccacattgaccagatcgcaggcagtgcaagcgtctggcacctttcccatgatatgatgaatgtagcaaagtttctgatacgcctttttgacgacagaaacgggttgagattctgacacgggaaagcactctaaacagtctttctgtccgtgagtgaagcagatatttgaattctgattcattctctcgcattgtctgcagggaaacagcatcagattcatgcccacgtgacgagaacatttgttttggtacctgtccgcgtagttgatcgaagcttccgcgtctgacgtcgatggctgcgcaactgactcgcgcgcccgtttgggctcacttatatctgcgtcactgggggcgggtcttttcttggctccaccctttttgacgtagaattcatgctccacctcaaccacgtgatcctttgcccaccggaaaaagtctttcacttcctgcttggtgaccttcccaaagtcatgatccagacggcgggttagttcaaatttgaacatccggtcttgcaacggctgctggtgttcgaaggtcgttgagttcccgtcaatcacggcgcacatgttggtgttggaggtggcgatcacgggagtcgggtctatctgggccgaggacttgcacttttggtccacgcgcaccttgcttcctccgagaatggcttcggccgattccacgaccttggcggtcatctttccctcctcccaccagatcaccatcttgtcgacacagtcgttgaagggaaagttctcattggtccagttgacgcagcaagggcgaattcgtttaaacctgcaggaactagtcccttagtgagg

SEQ ID NO: 4853 - protein, 735 aa, Adeno-associated virus
MAADGYLPDWLEDTLSEGIRQWWKLKPGPPPPKPAERHKDDSRGLVLPGYKYLGPFNGLYKGEPVNEADAAALEHDKAYDRQLDSGDNPYLKYNHAGAEFQERLKEDTSFGGNLGRAVFQAKKRVLEPLGLVEEPVKTAPGKKRPVEHSPVEPDSSSGTGKAGNQPARKRLNFGQTGDADSVPDPQPLGQPPAAPSGLGSTTMATGSGAPVADNNEGADGVGNSSGNWHCDSQWLGDRVITTSTRTWALPTYNNHLYKQISSQSGASNDNHYFGYSTPWGYFDFNRFHCHFSPRDWQRLINNNWGFRPKRLNFKLFNIQVKEVTQNDGTTTIANNLTSTVQVFTDSEYQLPYVLGSAHQGCLPPFPADVFMVPQYGYLTLNNGSQAVGRSSFYCLEYFPSQMLRTGNNFQFSYTFEDVPFHSSYAHSQSLDRLMNPLIDQYLYYLNKTQSNSGTLQQSRLLFSQAGPTSMSLQAKNWLPGPCYRQQRLSKQANDNNNSNFPWTAATKYHLNGRDSLVNPGPAMASHKDDEEKFFPMHGTLIFGKQGTNANDADLDNVMITDEEEIRTTNPVATEQYGYVSNNLQDSNTGPTTGTVNHQGALPGMVWQDRDVYLQGPIWAKIPHTDGHFHPSPLMGGFGLKHPPPQIMIKNTPVPANPPTNFSSAKFASFITQYSTGQVSVEIEWELQKENSKRWNPEIQYTSNYNKSVNVDFTVDTNGVYSEPRPIGTRYLTRNL

SEQ ID NO: 4854 - DNA, 2208 bp, Adeno-associated virus
atggctgccgatggttatcttccagattggctcgaggacactctctctgaaggaataagacagtggtggaagctcaaacctggcccaccaccgccaaagcccgcagagcggcataaggacgacagcaggggtcttgtgcttcctgggtacaagtacctcggacccttcaacggactctacaagggagagccggtcaacgaggcagacgccgcggccctcgagcacgacaaggcctacgaccggcagctcgacagcggagacaacccgtacctcaagtacaaccacgccggcgcggagtttcaggagcgccttaaagaagatacgtcttttgggggcaacctcggacgagcagtcttccaggccaaaaagagggttcttgaacctctgggcttggttgaggagcctgttaaaacggctccgggaaaaaagaggccggtagagcactctcctgtggagccagactcctcctcgggaaccggaaaagcgggcaaccagcctgcaagaaaaagattgaattttggtcagactggagacgcagactccgtacctgacccccagcctctcggacagccaccagcagccccctctggtctgggatctactacaatggctacaggcagtggcgcaccagtggcagacaataacgagggtgccgatggagtgggtaattcctcaggaaattggcattgcgattcccaatggctgggcgacagagtcatcaccaccagcacccgaacctgggctctgcccacctacaacaaccacctctacaagcaaatctccagccaatcaggagcctcaaacgacaaccactactttggctacagcaccccctgggggtattttgacttcaacagattccactgccacttttcaccacgtgactggcaaagactcatcaacaacaactggggattccgaccaaagagactcaacttcaagctctttaacattcaagtcaaagaggtcacgcagaatgacggtacgacgacgattgccaataaccttaccagcacggttcaggtgtttactgactcggagtaccagctcccgtacgtcctcggctcggcgcatcaaggatgcctcccgccgttcccagcagacgtcttcatggtgccacagtatggatacctcaccctgaacaacgggagtcaggcggtaggacgctcttccttttactgcctggagtactttccttctcagatgctgcgtactggaaacaactttcagttcagctacacctttgaagacgttcctttccacagcagctacgctcacagccagagtctggatcggctgatgaatcctctgatcgaccagtacctgtattatctgaacaagacacaatcaaatagtggaacccttcagcagtctcggctactgtttagccaagctggacccaccagcatgtctcttcaagctaaaaactggctgcctggaccttgctacagacagcagcgtctgtcaaagcaggcaaacgacaacaacaacagcaactttccctggactgcggctacaaagtatcatctaaatggccgggactcgttggttaatccaggaccagctatggccagccacaaagacgatgaagaaaagtttttccccatgcatggaaccctgatatttggtaaacaaggaacaaatgctaacgacgcggatttggacaatgtcatgattacagatgaagaagaaatccgcaccaccaatcccgtggctacggagcagtacggatatgtgtcaaataatttgcaagactcaaatactggtccaactactggaactgtcaatcaccaaggagcgttacctggtatggtgtggcaggatcgagacgtgtacctgcagggacccatttgggccaagattcctcacaccgatggacactttcatccttctccacttatgggaggttttggactcaaacacccacctcctcagatcatgattaaaaacactcccgttccagccaatcctcccacaaacttcagttctgccaagtttgcttctttcatcacacagtattccacgggacaagtcagcgtagagatcgagtgggagctgcagaaggagaacagcaaacgctggaaccccgagatccagtacacttccaactataacaaatctgttaatgtggactttactgtggacactaatggtgtgtattcagagcctcgccccattggcaccagatacctgactcgtaatctgtaa

SEQ ID NO: 4855 - protein, 738 aa, Adeno-associated virus
MAADGYLPDWLEDNLSEGIREWWDLKPGAPKPKANQQKQDDGRGLVLPGCKYLGPFNGLDKGEPVNAADAAALEHDKAYDQQLKAGDNPYLRYNHADAEFQERLQEDTSFGGNLGRAVFQAKKRVLEPLGLVEEGAKTAPGKKRPVEPSPQRSPDSSTGIGKTGQQPAKKRLNFGQTGDSESVPDPQPIGEPPAGPSGLGSGTMAAGGGAPMADNNEGADGVGSSSGNWHCDSTWLGDRVITTSTRTWALPTYNNHLYKQISNGTSGGSTNDNTYFGYSTPWGYFDFNRFHCHFSPRDWQRLINNNWGFRPKRLNFKLFNIQVKEVTQNEGTKTIANNLTSTIQVFTDSEYQLPYVLGSAHQGCPPPFPADVFMIPQYGYLTLNNGSQAVGRSSFYCLEYFPSQMRRTGNNFEFSYQFEDVPFHSSYAHSQSLDRLMNPLIDQYLYYLSRTQSTGGTAGTQQLLFSQAGPNNMSAQAKNWLPGPCYRQQRVSTTLSQNNNSNFAWTGATKYHLNGRDSLVNPGVAMATHKDDEERFFPSSGVLMFGKQGAGKDNVDYSSVMLTSEEEIKTTNPVATEQYGVVADNLQQQNAAPIVGAVNSQGALPGMVWQNRDVYLQGPIWAKIPHTDGNFHPSPLMGGFGLKHPPPQILIKNTPVPADPPTTFSQAKLASFITQYSTGQVSVEIEWELQKENSKRWNPEIQYTSNYNKSVNVDFTVDTNGVYSEPRPIGTRYLTRNL

SEQ ID NO: 4856 - DNA, 2217 bp, Adeno-associated virus
atggctgccgatggttatcttccagattggctcgaggacaacctctctgagggcattcgcgagtggtgggacttgaaacctggagccccgaaacccaaagccaaccagcaaaagcaggacgacggccggggtctggtgcttcctggctgcaagtacctcggacccttcaacggactcgacaagggggagcccgtcaacgcggcggacgcagcggccctcgagcacgacaaggcctacgaccagcagctcaaagcgggtgacaatccgtacctgcggtataaccacgccgacgccgagtttcaggagcgtctgcaagaagatacgtcttttgggggcaacctcgggcgagcagtcttccaggccaagaagcgggttctcgaacctctcggtctggttgaggaaggcgctaagacggctcctggaaagaagagaccggtagagccatcaccccagcgttctccagactcctctacgggcatcggcaagacaggccagcagcccgcgaaaaagagactcaactttgggcagactggcgactcagagtcagtgcccgaccctcaaccaatcggagaaccccccgcaggcccctctggtctgggatctggtacaatggctgcaggcggtggcgctccaatggcagacaataacgaaggcgccgacggagtgggtagttcctcaggaaattggcattgcgattccacatggctgggcgacagagtcatcaccaccagcacccgaacctgggccctccccacctacaacaaccacctctacaagcaaatctccaacgggacatcgggaggaagcaccaacgacaacacctacttcggctacagcaccccctgggggtattttgactttaacagattccactgccacttctcaccacgtgactggcagcgactcatcaacaacaactggggattccggcccaagagactcaacttcaagctcttcaacatccaggtcaaggaggtcacgcagaatgaaggcaccaagaccatcgccaataaccttaccagcacgattcaggtctttacggactcggaataccagctcccgtacgtcctcggctctgcgcaccagggctgcccgcctccgttcccggcggacgtcttcatgattcctcagtacgggtacctgactctgaacaacggcagtcaggccgtgggccgttcctccttctactgcctggagtactttccttctcaaatgcggagaacgggcaacaactttgagttcagctaccagtttgaggacgtgccttttcacagcagctacgcgcatagccaaagcctggaccggctgatgaaccccctcatcgaccagtacctgtactacctgtctcggactcagtccacgggaggtaccgcaggaactcagcagttgctattttctcaggccgggcctaataacatgtcggctcaggccaaaaactggctacccgggccctgctaccggcagcaacgcgtctccacgacactgtcgcaaaataacaacagcaactttgcttggaccggtgccaccaagtatcatctgaatggcagagactctctggtaaatcccggtgtcgctatggcaacgcacaaggacgacgaagagcgattttttccatccagcggagtcttgatgtttgggaaacagggagctggaaaagacaacgtggactatagcagcgttatgctaaccagtgaggaagaaatcaaaaccaccaacccagtggccacagaacagtacggcgtggtggccgataacctgcaacagcaaaacgccgctcctattgtaggggccgtcaacagtcaaggagccttacctggcatggtctggcagaaccgggacgtgtacctgcagggtcctatctgggccaagattcctcacacggacggcaactttcatccttcgccgctgatgggaggctttggactgaaacacccgcctcctcagatcctgattaagaatacacctgttcccgcggatcctccaactaccttcagtcaagccaagctggcgtcgttcatcacgcagtacagcaccggacaggtcagcgtggaaattgaatgggagctgcagaaagagaacagcaagcgctggaacccagagattcagtatacttccaactataacaaatctgttaatgtggactttactgtggacactaatggtgtgtattcagagcctcgccccattggcaccagatacctgactcgtaatctgtaa

SEQ ID NO: 4857 - DNA, 3167 bp, Adeno-associated virus
attgaatttagcggccgcgaattcgcccttcgcagagaccaaagttcaactgaaacgaattaaacggtttattgattaacaagcaattacagattacgagtcaggtacctggtgccaatggggcgaggctctgaatacacaccattagtgtccacagtaaagtccacattaacagatttgttgtagttggaagtgtactgaatctcgggattccagcgtttgctgttctccttctgcagctcccactcgatctccacgctgacctgccccgtggagtactgtgtaatgaaggaagcaaactttgccgcactgaaggtagtcgaaggattcgcaggtaccggggtgttcttgatgagaatctgcgggggagggtgtttaagtccgaatccgcccatgaggggagaggggtgaaaatgtccgtccgtgtgtggaatctttgcccagatgggcccctgcaggtacacgtctctgtcctgccacaccatgcctggaagaacgccttgtgtgttgacatctgaggtagctgcttgtgtgttgccgctctggaggttggtagatacagaaccatactgctccgtagccacgggattggtggtcctgatttcctcttcgtctgtaatcatgaccttttcaatgtccacattagtttttcccgagtcttgttttccaaagatgagaaccccgctctgaggaaaaaacttttcttcatcgtccttgtggctggccatggccgggcccggattcaccagagagtctcttccattaaggtggtacttggtagctccagtccacgagtattcactgttgttgttatccgcagatgtctttgatactcgctgctggcggtaacagggtccaggaagccagttcctagactggtcccgaatgtcacttgctccggcctgagaaaactgaagccttgactgcgtggtggttccgcttggagtgtttgttctgctcaagtaatacaggtactggtcgatgagaggattcatgagacggtccaaactctggctgtgggcgtagctgctgtggaaaggaacgtcctcaaaggtgtagctgaaggtaaagttgtttccggtacgcagcatctgagaaggaaagtactccaggcagtaaaatgaagagcgtcctactgcctgactcccgttgttcagggtgaggtatccatactgtggcaccatgaagacgtctgctgggaacggcgggaggcatccttgatgcgccgagccgaggacgtacgggagctggtactccgagtcagtaaacacctgaaccgtgctggtaaggttattggcaatcgtcgtcgtaccgtcattctgcgtgacctccttgacttgaatgttaaagagcttgaagttgagtcttttgggccggaatccccaattgttgttgatgagtctttgccagtcacgtggcgaaaagtggcagtggaatctgttgaagtcaaaatacccccaaggggtgctgtagccaaagtagtggttgtcgtttgaggctcctgattggctggaaatctgcttgtagaggtggttgttgtaggtgggcagagcccaggtgcgggtgctggtggtgatgactctgtcgcccatccatgtggaatcgcaatgccaatttcccgaggaattacccactccgtcggcgccctcgttattgtctgccattggtgcgccactgcctgtagccatcgtattagttcccagaccagagggggctgctggtggctgtccgagaggctgggggtcaggtacggagtctgcgtctccagtctgaccgaaattcaatctctttcttgcaggctgctggcccgcttttccggttcccgaggaggagtctggctccgcaggagagtgctctaccggcctcttttttcccggagccgtcttaacaggttcctcaaccaggcccagaggttcaagaaccctctttttcgcctggaagactgctcgtccgaggttgcccccaaaagacgtatcttctttaagacgctcctggaactccgcgtcggcgtggttgtacttggggtacgggttgtctccgctgtcgagctgccggtcgtaggccttgtcgtgctcgagggccgcggcgtctgcctcgttgaccggctctcccttgtcgagtccgttgaagggtccaaggtacttgtacccaggaagcacaagacccctgctgtcgtccttatgccgctctgcgggctttggtggtggtgggccaggtttgagcttccaccactgtcttattccttcagagagagtgtcctcgagccaatctggaagataaccatcggcagccatacctgatttaaatcatttattgttcagagatgcagtcatccaaatccacattgaccagatcgcaagcagtgcaagcgtctggcacctttcccatgatatgatgaatgtagcacagtttctgatacgcctttttgacgacagaaacgggttgagattctgacacgggaaagcactctaaacagtctttctgtccgtgagtgaagcagatatttgaattctgattcattctctcgcattgtctgcagggaaacagcatcagattcatgcccacgtgacgagaacatttgttttggtacctgtccgcgtagttgattgaagcttccgcgtctgacgtcgatggctgcgcaactgactcgcgcgcccgtttgggctcacttatatctgcgtcactgggggcgggtctttttttggctccaccctttttgacgtagaattcatgctctacctcaaccacgtgatcctttgcccaccggaaaaagtctttgacttcctgcttggtgaccttcccaaagtcatgatccagacggcgggtgagttcaaatttgaacatccggtcttgcaacggctgctggtgttcgaaggtcgttgagttcccgtcaatcactgcgcacatgttggtgttggaggtgacaatcacgggagtcgggtctatctgggccgaggacttgcatttctggtccacgcgcaccttgcttcctccgagaatggctttggccgactccacgaccttggcggtcatcttcccctcctcccaccagatcaccatcttgtcgacgcaatcattgaaaggaaagttctcattggtccagttgacgcagccgtagaaagggcgaattcgtttaaacctgcaggactagtccctttagtgagggt

SEQ ID NO: 4858 - DNA, 3161 bp, Adeno-associated virus
aattgaatttagcggccgcgaattcgcccttcgcagagaccaaagttcaactgaaacgaattaaacggtttattgattaacaagcaattacagattacgagtcaggtatctggtgccaatggggcgaggctctgaatacacaccattagtgtccacagtaaagtccacattaacagatttgttgtagttggaagtgtactgaatctcgggattccagcgtttgctgttctccttctgcagctcccactcgatctccacgctgacctgccccgtggagtactgtgtaatgaaggaagcaaactttgccgcactgaaggtagtcgaaggattcgcaggtaccggggtgttcttgatgagaatctgcgggggagggtgtttaagtccgaatccgcccatgaggggagaggggtgaaaatgtccgtccgtgtgtggaatctttgcccagatgggcccctgcaggtacacgtctctgtcctgccacaccatgcctggaagaacgccttgtgtgttgacatctgaggtagctgcttgtgtgttgccgctctggaggttggtagatacagaaccatactgctccgtagccacgggattggtggtcctgatttcctcttcgtctgtaatcatgaccttttcaatgtccacattagtttttcccgagtcttgttttccaaagatgagaaccccgctctgaggaaaaaacttttcttcatcgtccttgtggctggccatggccgggcccggattcaccagagagtctcttccattaaggtggtacttggtagctccagtccacgagtattcactgttgttgttatccgcagatgtctttgatactcgctgctggcggtaacagggtccaggaagccagttcctagactggtcccgaatgtcacttgctccggcctgagaaaactgaagccttgactgcgtggtggttccgcttggagtgtttgttctgctcaagtaatacaggtactggtcgacgagaggattcatgagacggtccaaactctggctgtgggcgtagctgctgtggaaaggaacgtcctcaaaggtgtagctgaaggtaaagttgtttccggtacgcagcatctgagaaggaaagtactccaggcagtaaaatgaagagcgtcctactgcctgactcccgttgttcagggtgaggtatccatactgtggcaccatgaagacgtctgctgggaacggcgggaggcatccttgatgcgccgagccgaggacgtacgggagctggtactccgagtcagtaaacacctgaaccgtgctggtaaggttattggcaatcgtcgtcgtaccgtcattctgcgtgacctccttgacttgaatgttaaagagcttgaagttgagtcttttgggccgggatccccaattgttgttgatgagtctttgccagtcacgtggcgaaaagtggcagtggaatctgttgaagtcaaaatacccccaaggggtgctgtagccaaagtagtggttgtcgtttgaggctcctgattggctggaaatctgcctgtagaggtggttgttgtaggtgggcagagcccaggtgcgggtgctggtggtgatgactctgtcgcccatccatgtggaatcgcaatgccaatttcccgaggaattacccactccgtcggcgccctcgttattgtctgccattggtgcgccactgcctgtagccatcgtattagttcccagaccagagggggctgctggtggctgtccgagaggctgggggtcaggtacggagtctgcgtctccagtctgaccgaaattcaatctccttcttgcaggctgctggcccgcttttccggttcccgaggaggagtctggctccgcaagagagtgctctaccggcctcttttttcccggagccgtcttaacaggttcctcaaccaggcccagaggttcaagaaccctctttttcgcctggaagactgctcgtccgaggttgcccccaaaagacgtatcttctttaagacgctcctggaactccgcgtcggcgtggttgtacttgaggtacgggttgtctccgccgtcgagctgccggtcgtaggccttgtcgtgctcgagggccgcggcgtctgcctcgttgaccggctctcccttgtcgagtccgttgaagggtccaaggtacttgtacccaggaagcacaagacccctgctgtcgtccttatgccgctctgcgggctttggtggtggtgggccaggtttgagcttccaccactgtcttattccttcagagagagtgtcctcgagccaatctggaagataaccatcggcagccatacctgatttaaatcatttattgttcagagatgcagtcatccaaatccacattgaccagatcgcaagcagtgcaagcgtctggcacctttcccatgatatgatgaatgtagcacagtttctgatacgcctttttgacgacagaaacgggttgagattctgacacgggaaagcactctaaacagtctttctgtccgtgagtgaagcagatatttgaattctgattcattctctcgcattgtctgcagggaaacagcatcagattcatgcccacgtgacgagaacatttgttttggtacctgtccgcgtagttgattgaagcttccgcgtctgacgtcgatggctgcgcaactgactcgcgcgcccgtttgggctcacttatatctgcgtcactgggggcgggtctttttttggctccaccctttttgacgtagaattcatgctctacctcaaccacgtgatcctttgcccaccggaaaaagtctttgacttcctgcttggtgaccttcccaaagtcatgatccagacggcgggtgagttcaaatttgaacatccggtcttgcaacggctgctggtgttcgaaggtcgttgagttcccgtcaatcactgcgcacatgttggtgttggaggtgacaatcacgggagtcgggtctatctgggccgaggacttgcatttctggtccacgcgcaccttgcttcctccgagaatggctttggccgactccacgaccttggcggtcatcttcccctcctcccaccagatcaccatcttgtcgacgcaatcattgaaaggaaagttctcattggtccagttgacgcagcaagggcgaattcgtttaaacctgcaggactagtccctttagtgaggg

SEQ ID NO: 4859 - DNA, 3172 bp, Adeno-associated virus
gattgaatttagcggccgcgaattcgcccttgctgcgtcaactggaccaatgagaactttcccttcaacgattgcgtcgacaagatggtgatctggtgggaggagggcaagatgaccgccaaggtcgtggagtccgccaaggccattctgggtggaagcaaggtgcgcgtggaccaaaagtgcaagtcatcggcccagatcgaccccacgcccgtgatcgtcacctccaacaccaacatgtgcgccgtgatcgacgggaacagcaccaccttcgagcaccagcagcccctgcaggaccgcatgttcaagttcgagctcacccgccgtctggagcacgactttggcaaggtgaccaagcaggaagtcaaagagttcttccgctgggctcaggatcacgtgactgaggtggcgcatgagttctacgtcagaaagggcggagccaccaaaagacccgcccccagtgacgcggatataagcgagcccaagcgggcctgcccctcagttgcggagccatcgacgtcagacgcggaagcaccggtggactttgcggacaggtaccaaaacaaatgttctcgtcacgcgggcatgcttcagatgctgtttccctgcaagacatgcgagagaatgaatcagaatttcaacgtctgcttcacgcacggggtcagagactgctcagagtgcttccccggcgcgtcggaatctcaacccgtcgtcagaaaaaagacgtatcagaaactgtgcgcgattcatcatctgctggggcgggcacccgagattgcgtgttcggcctgcgatctcgtcaacgtggacttggatgactgtgtttctgagcaataaatgacttaaaccaggtatggctgctgacggttatcttccagattggctcgaggacaacctctctgagggcattcgcgagtggtgggacctgaaacctggagcccccaagcccaaggccaaccagcagaagcaggacgacggccggggtctggtgcttcctggctacaagtacctcggacccttcaacggactcgacaagggggagcccgtcaacgcggcggacgcagcggccctcgagcacgacaaggcctacgaccagcagctcaaagcgggtgacaatccgtacctgcggtataaccacgccgacgccgagtttcaggagcgtctgcaagaagatacgtcttttgggggcaacctcgggcgagcagtcttccaggccaagaagcgggttctcgaacctctcggtctggttgaggaagctgctaagacggctcctggaaagaagagaccggtagaaccgtcacctcagcgttcccccgactcctccgcgggcatcggcaagaaaggccagcagcccgctaaaaagagactgaactttggtcagactggcgactcagagtcagtccccgaccctcaaccaatcggagaaccaccagcaggcccctctggtctgggatctggtacaatggctgcaggcggtggcgctccaatggcagacaataacgaaggcgccgacggagtgggtagttcctcaggaaattggcattgcgattccacatggctgggcgacagagtcatcaccaccagcacccgaacctgggccctgcccacctacaacaaccacctctacaagcaaatatccaatgggacatcgggaggaagcaccaacgacaacacctacttcggctacagcaccccctgggggtattttgacttcaacagattccactgccacttctcaccacgtgactggcagcgactcatcaacaacaactggggattccggccaaaaagactcagcttcaagctcttcaacatccaggtcaaggaggtcacgcagaatgaaggcaccgagaccatcgccaataaccttaccagcacgattcaggtatttacggactcggaataccagctgccgtacgtcctcggctccgcgcaccagggctgcctgcctccgttcccggcggacgtcttcatgattccccagtacggctaccttacactgaacaatggaagtcaagccgtaggccgttcctccttctactgcctggaatattttccatctcaaatgctgcgaactggaaacaattttgaattcagctacaccttcgaggacgtgcctttccacagcagctgcgcacacagccagagctcggaccgactgatgaatcctctcatcgaccagtacctgtactacttatccagaactcggtccacaggaggaactcaaggtacccagcaattgttattttctcaagctgggcctgcaaacatgtcggctcaggctaagaactggctacctggaccttgctaccggcagcagcgagtctctacgacactgtcgcaaaacaacaacagcaactttgcttggactggtgccaccaaatatcacctgaacggaagagactctttggtaaatcccggtgtcgccatggcaacccacaaggacgacgaggaacgcttcttcccgtcgagtggagtcctgatgtttggaaaacagggtgctggaagagacaatgtggactacagcagcgttatgctaaccagcgaagaagaaattaaaaccactaaccctgtagccacagaacaatacggtgtggtggctgacaacttgcagcaaaccaatacagggcctattgtgggaaatgtcaacagccaaggagccttacctggcatggtctggcagaaccgagacgtgtacctgcagggtcccatctgggccaagattcctcacacggacggcaacttccacccttcaccgctaatgggaggatttggactgaagcacccacctcctcagatcctgatcaagaacacgccggtacctgcggatcctccaacaacgttcagccaggcgaaattggcttccttcattacgcagtacagcaccggacaggtcagcgtggaaatcgagtgggagctgcagaaggagaacagcaaacgctggaacccagagattcagtacacttcaaactactacaaatctacaaatgtggactttgctgtcaatacagagggaacttattctgagcctcgccccattggtactcgttacctcacccgtaatctgtaattgctggttaatcaataaaccgtttgattcgtttcagttgaactttggtctctgcgaagggcgaattcgtttaaacctgcaggactagtccctttagtgagg

SEQ ID NO: 4860 - DNA, 3172 bp, Adeno-associated virus
gattgaatttagcggccgcgaattcgcccttgctgcgtcaactggaccaatgagaactttcccttcaacgattgcgtcgacaagatggtgatctggtgggaggagggcaagatgaccgccaaggtcgtggagtccgccaaggccattctgggtggaagcaaggtgcgcgtggaccaaaagtgcaagtcatcggcccagatcgaccccacgcccgtgatcgtcacctccaacaccaacatgtgcgccgtgatcggcgggaacagcaccaccttcgagcaccagcagcccctgcaggaccgcatgttcaagttcgagctcacccgccgtctggagcacgactttggcaaggtgaccaagcaggaagtcaaagagttcttccgctgggctcaggatcacgtgactgaggtggcgcatgagttctacgtcagaaagggcggagccaccaaaagacccgcccccagtgacgcggatataagcgagcccaagcgggcctgcccctcagttgcggagccatcgacgtcagacgcggaagcaccggtggactttgcggacaggtaccaaaacaaatgttctcgtcacgcgggcatgcttcagatgctgtttccctgcaagacatgcgagagaatgaatcagaatttcaacgtctgcttcacgcacggggtcagagactgctcagagtgcctccccggcgcgtcagaatctcaacccgtcgtcagaaaaaagacgtatcagaaactgtgcgcgattcatcatctgctggggcgggcacccgagattgcgtgttcggcctgcgatctcgtcaacgtggacttggatgactgtgtttctgagcaataaatgacttaaaccaggtatggctgctgacggttatcttccagattggctcgaggacaacctctctgagggcattcgcgagtggtgggacctgaaacctggagcccccaagcccaaggccaaccagcagaagcaggacgacggccggggtctggtgcttcttggctacaagtacctcggacccttcaacggactcgacaagggggagcccgtcaatgcggcggacgcagcggccctcgagcacgacaaggcctacgaccagcagctcaaagcgggtgacaatccgtacctgcggtataaccacgccgacgccgagtttcaggagcgtctgcaagaagatacgtcttttgggggcaacctcgggcgagcagtcttccaggccaagaagcgggttctcgaacctctcggtctggttgaggaagctgctaagacggctcctggaaagaagagaccggtagaaccgtcacctcagcgttcccccgactcctccacgggcatcggcaagaaaggccagcagcccgctaaaaagagactgaactttggtcagactggcgactcagagtcagtccccgaccctcaaccaatcggagaaccaccagcaggcccctctggtctgggatctggtacaatggctgcaggcggtggcgctccaatggcagacaataacgaaggcgccgacggagtgggtagttcctcaggaaattggcattgcgattccacatggctgggcgacagagtcatcaccaccagcacccgaacctgggccctgcccacctacaacaaccacctctacaagcaaatatccaatgggacatcgggaggaagcaccaacgacaacacctacttcggctacagcaccccctgggggtattttgacttcaacagattccactgccacttctcaccacgtgactggcagcgactcatcaacaacaactggggattccggccaaaaagactcagcttcaagctcttcaacatccaggtcaaggaggtcacgcagaatgaaggcaccaagaccatcgccaataaccttaccagcacgattcaggtatttacggactcggaataccagctgccgtacgtcctcggctccgcgcaccagggctgcctgcctccgttcccggcggacgtcttcatgattccccagtacggctaccttacactgaacaatggaagtcaagccgtaggccgttcctccttctactgcctggaatattttccatctcaaatgctgcgaactggaaacaattttgaattcagctacaccttcgaggacgtgcctttccacagcggctacgcacacagccagagcttggaccgactgatgaatcctctcatcgaccagtacctgtactacttatccagaactcagtccacaggaggaactcaaggtacccagcaattgttattttctcaagctgggcctgcaaacatgtcggctcaggctaagaactggctacctggaccttgctaccggcagcagcgagtctctacgacactgtcgcaaaacaacaacagcaactttgcttggactggtgccaccaaatatcacctgaacggaagagactctttggtaaatcccggtgtcgccatggcaacccacaaggacgacgaggaacgcttcttcccgtcgagtggagtcctgatgtttggaaaacagggtgctggaagagacaatgtggactacagcagcgttatgctaaccagcgaagaagaaattaaaaccactaaccctgtagccacagaacaatacggtgtggtggctgacaacttgcagcaaaccaatacagggcctattgtgggaaatgtcaacagccaaggagccttacctggcatggtctggcagaaccgagacgtgtacctgcagggtcccatctgggccaagattcctcacacggacggcaacttccacccttcaccgctaatgggaggatttggactgaagcacccacctcctcagatcctgatcaagaacacgccggtacctgcggatcctccaacgacgttcagccaggcgaaattggcttccttcattacgcagtacagcaccggacaggtcagcgtggaaatcgagtgggagctgcagaaggagaacagcaaacgctggaacccagagattcagtacacttcaaactactacaaatctacaaatgtggactttgctgtcaatacagagggaacttattctgagcctcgccccattggtactcgttacctcacccgtaatctgtaattgctggttaatcaataaaccgtttgattcgtttcagttgaactttggtctctgcgaagggcgaattcgtttaaacctgcaggactagtccctttagtgagg

SEQ ID NO: 4861 - DNA, 2208 bp, Adeno-associated virus
atggctgccgatggttatcttccagattggctcgaggacactctctctgaaggaataagacagtggtggaagctcaaacctggcccaccaccaccaaagcccgcagagcggcataaggacgacagcaggggtcttgtgcttcctgggtacaagtacctcggacccttcaacggactcgacaagggagagccggtcaacgaggcagacgccgcggccctcgagcacgacaaggcctacgaccggcagctcgaaagcggagacaacccgtacctcaagtacaaccacgccgacgcggagtttcaggagcgtcttaaagaagatacgtcttttgggggcaacctcggacgagcagtcttccaggcgaaaaagagggttcttgaacctctgggcctggttgaggagcctgttaaaacggctccgggaaaaaagaggccggtagagcactctcctgtggagccagactcctcctcgggaaccggaaaagcgggccagcagcctgcgagaaaaagattgaattttggtcagactggagacgcagactccgtacctgacccccagcctctcggacagccaccagcagccccctctggtctgggatctactacaatggcttcaggcagtggcgcaccagtggcagacaataacgagggtgccgatggagtgggtaattcctcaggaaattggcattgcgattcccaatggctgggcgacagagtcatcaccaccagcacccgaacctgggccctgcccacctacaacaaccacctctacaagcaaatctccagccaatcaggagcctcaaacgacaaccactactttggctacagcaccccctgggggtattttgacttcaacagattccactgccacttttcaccacgtgactggcaaagactcatcaacaacagctggggattccgacccaaaagactcaacttcaagctctttaacattcaagtcaaagaggtcacgcagaatgacggtacgacgacgattgccaataaccttaccagcacggttcaagtgtttaccgactcggagtaccagctcccgtacgtcctcggctcggcgcatcaaggatgcctcccgccgttcccagcagacgtctttatggtcccacagtatggatacctcaccctgaacaacgggagtcaggcggtaggacgctcttccttttactgcctggagtactttccttctcagatgctgcgtactggaaacaactttcagttcagctacacctttgaagacgttcccttccacagcagctacgctcacagccagagtctggatcggctgctgaatcctctgatcgaccagtacctatattatctgaacaagacacaatcaaatagtggaactcttcagcagtctcggctactgtttagccaagctggacccaccagcatgtctcttcaagctaaaaactggctgcctggaccttgctacagacagcagcgtctgtcaaagcaggcaaacgacaacaacaacagcaactttccctggactgcggctacaaagtatcatctaaatggccgggactcgttggttaatccaggaccagctatggccagccacaaagacgatgaagaaaagtttttccccatgcatggaaccctgatatttggtaaacaaggaacaaatgctaacgacgcggatttggacaatgtcatgattacagatgaagaagaaatccgcaccaccaatcccgtggctacggagcagtacggatatgtgtcaaataatttgcaaaactcaaatactggtccaactactggaactgtcaatcaccaaggagcgttacctggtatggtgtggcaggatcgagacgtgtacctgcagggacccatttgggccaagattcctcacacggacgggcactttcatccttctccactaatgggaggttttgggctcaaacacccgcctcctcagatcatgatcaaaaacactcccgttccagccaatcctcctacaaacttcagttcttccaagtttgcttctttcatcacacagtattccacggggcaggtcagcgtggagatcgagtgggagctgcagaaggagaacagcaaacgctggaatcccgaaattcagtatacttccaactacaacaaatctgttaatgtggactttactgtggacactaatggtgtgtattcagagcctcgccccattggcaccagatacccgactcgtaatctgtaa

SEQ ID NO: 4862 - protein, 735 aa, Adeno-associated virus
MAADGYLPDWLEDTLSEGIRQWWKLKPGPPPPKPAERHKDDSRGLVLPGYKYLGPFNGLDKGEPVNEADAAALEHDKAYDRQLESGDNPYLKYNHADAEFQERLKEDTSFGGNLGRAVFQAKKRVLEPLGLVEEPVKTAPGKKRPVEHSPVEPDSSSGTGKAGQQPARKRLNFGQTGDADSVPDPQPLGQPPAAPSGLGSTTMASGSGAPVADNNEGADGVGNSSGNWHCDSQWLGDRVITTSTRTWALPTYNNHLYKQISSQSGASNDNHYFGYSTPWGYFDFNRFHCHFSPRDWQRLINNSWGFRPKRLNFKLFNIQVKEVTQNDGTTTIANNLTSTVQVFTDSEYQLPYVLGSAHQGCLPPFPADVFMVPQYGYLTLNNGSQAVGRSSFYCLEYFPSQMLRTGNNFQFSYTFEDVPFHSSYAHSQSLDRLLNPLIDQYLYYLNKTQSNSGTLQQSRLLFSQAGPTSMSLQAKNWLPGPCYRQQRLSKQANDNNNSNFPWTAATKYHLNGRDSLVNPGPAMASHKDDEEKFFPMHGTLIFGKQGTNANDADLDNVMITDEEEIRTTNPVATEQYGYVSNNLQNSNTGPTTGTVNHQGALPGMVWQDRDVYLQGPIWAKIPHTDGHFHPSPLMGGFGLKHPPPQIMIKNTPVPANPPTNFSSSKFASFITQYSTGQVSVEIEWELQKENSKRWNPEIQYTSNYNKSVNVDFTVDTNGVYSEPRPIGTRYPTRNL

SEQ ID NO: 4863 - DNA, 2208 bp, Adeno-associated virus
atggctgccgatggttatcttccagattggctcgaggacactctctctgaaggaataagacagtggtggaagctcaaacctggcccaccaccaccaaagcccgcagagcggcataaggacgacagcaggggtcttgtgcttcctgggtacaagtacctcggacccttcaacggactcgacaagggagagccggtcaacgaggcagacgccgcggccctcgagcacgacaaggcctacgaccggcagctcgacagcggagacaacccgtacctcaagtacaaccacgccgacgcggagtttcaggagcgtcttaaagaagatacgtcttttgggggcaacctcggacgagcagtcttccaggccaaaaagaggattcttgaacctctgggcctggttgaggaacctgttaagacggctccgggagaaaagaggccggtagagcactctcctgcggagccagactcctcctcgggaaccggaaaagcgggccagcagcctgcaagaaagagattgaattttggccagactggagacgcagactcagtacctgacccccagcctctcggacagccaccagcagccccctctggtctgggaactaatacgatggcttcaggcagtggcgcaccaatggcagacaataacgagggcgccgacggagtgggtaattcctcgggaaattggtattgcgattccacatggatgggcgacagagtcatcaccaccagcacccgcacctgggccctgcccacctacaacaaccatctgtacaagcaaatctccagccagtctggagccagcaacgacaaccactactttggctacagcaccccctgggggtattttgacttcaacagattccactgccacttctccccacgtgactggcaaagactcatcaacaacaactggggattccggcccaagagactcagcttcaagctctttaacattcaagtcaaagaggtcacgcagaatgacggtacgacgacgattgccaataaccttaccagcacggttcaggtgtttactgactcggagtaccagctcccgtacgtcctcggctcggcgcatcaaggatgcctcccgccgttcccagcagacgtcttcatggtgccacagtatggatacctcaccctgaacaacggcagtcaggcggtaggacgctcttccttttactgcctggagtactttccttctcagatgcttcgtaccggaaacaactttaccttcagctacacctttgaagacgttcctttccatagcagctacgctcacagccaaagtctggaccgtctcatgaatcctctcatcgaccagtacctgtattacttgagcagaacaaacactccaagcggaaccaccacgatgtccaggcttcagttttctcaggccggagcaagtgacattcgggaccagtctagaaactggcttcctggaccctgttaccgccagcagcgagtatcaaagacagctgcggacaacaacaacagtgattactcgtggactggagctaccaagtaccacctcaatggaagagactctctggtgaatccgggcccagctatggccagccacaaggacgatgaagaaaaatattttcctcagagcggggttctcatctttggaaaacaagactcgggaaaaactaatgtggacattgaaaaggttatgattacagacgaagaggaaatcaggaccaccaatcccgtggctacggagcagtatggttctgtatctaccaacctccagagcggcaacacacaagcagctacctcagatgtcaacacacaaggcgttcttccaggcatggtctggcaggacagagacgtgtacctgcaggggcccatctgggcaaagattccacacacggacggacattttcacccctctcccctcgtgggcggattcggacttaaacaccctcctccacaaattctcatcaagaacaccccggtacctgcgaatccttcgaccactttcagtgcggcaaagtttgcttccttcatcacacagtactccacggggcaggtcagcgtggagatcgagtgggagctgcagaaggagaacagcaaacgctggaatcccgaaattcagtacacttccaactacaacaaatctgttaatgtggactttactgtggacactaatggtgtgtattcagagcctcgccccattggcaccagatacctgactcgtaatctgtaa

SEQ ID NO: 4864 - protein, 735 aa, Adeno-associated virus
MAADGYLPDWLEDTLSEGIRQWWKLKPGPPPPKPAERHKDDSRGLVLPGYKYLGPFNGLDKGEPVNEADAAALEHDKAYDRQLDSGDNPYLKYNHADAEFQERLKEDTSFGGNLGRAVFQAKKRILEPLGLVEEPVKTAPGEKRPVEHSPAEPDSSSGTGKAGQQPARKRLNFGQTGDADSVPDPQPLGQPPAAPSGLGTNTMASGSGAPMADNNEGADGVGNSSGNWYCDSTWMGDRVITTSTRTWALPTYNNHLYKQISSQSGASNDNHYFGYSTPWGYFDFNRFHCHFSPRDWQRLINNNWGFRPKRLSFKLFNIQVKEVTQNDGTTTIANNLTSTVQVFTDSEYQLPYVLGSAHQGCLPPFPADVFMVPQYGYLTLNNGSQAVGRSSFYCLEYFPSQMLRTGNNFTFSYTFEDVPFHSSYAHSQSLDRLMNPLIDQYLYYLSRTNTPSGTTTMSRLQFSQAGASDIRDQSRNWLPGPCYRQQRVSKTAADNNNSDYSWTGATKYHLNGRDSLVNPGPAMASHKDDEEKYFPQSGVLIFGKQDSGKTNVDIEKVMITDEEEIRTTNPVATEQYGSVSTNLQSGNTQAATSDVNTQGVLPGMVWQDRDVYLQGPIWAKIPHTDGHFHPSPLVGGFGLKHPPPQILIKNTPVPANPSTTFSAAKFASFITQYSTGQVSVEIEWELQKENSKRWNPEIQYTSNYNKSVNVDFTVDTNGVYSEPRPIGTRYLTRNL

SEQ ID NO: 4865 - DNA, 2209 bp, Adeno-associated virus
atggctgccgatggttatcctccagattggctcgaggacactctctctgaagggataagacagtggtggaagctcaaacctggcccaccaccaccaaagcccgcagagcggcataaggacgacagcaggggtcttgtgcttcctgggtacaagtacctcggacccttcaacggactcgacaagggggagccggtcaacgaggcagacgccgcggccctcgagcacgacaaggcctacgaccggcagctcgacagcggagacaacccgtacctcaagtacaaccacgccgacgcagagtttcaggagcgccttaaagaagatacgtcttttgggggcaacctcggacgagcagtcttccaggcgaaaaagagggttcttgaacctctgggcctggttgaggaacctgttaagacggctccgggaaaaaagaggccggtagagcactctcctgtggagccagactcctcctcgggaaccggaaaagcgggccagcggcctgcaagaaaaagattaaattttggtcagactggagacgcagactccgtacctgacccccagcctctcggacagccaccagcagccccctctggtctgggatctactacaatggctacaggcagtggcgcaccaatggcagacaataacgagggtgccgatggagtgggtaattcctcaggaaattggcattgcgattcccaatggctgggcgacagagtcatcaccaccagcacccgaacctgggccctgcccacatacaacaaccacctctacaagcaaatctccagccaatcaggagccagcaacgacaaccactactttggctacagcaccccctgggggtattttgacttcaacagattccactgccacttttcaccacgtgactggcaaagactcatcaacaacaactggggattccggcccaaaagactcaacttcaagctctttaatattcaagtcaaagaggtcacgcagaatgacggtacgacgacgattgccaataaccttaccagcacggttcaggtgtttactgactcggagtaccagctcccgtacgtcctgggctcggcgcatcaaggatgcctcccgccgtttccagcggacgtcttcatggtcccacagtatggatacctcaccctgaacaacgggagtcaggcggtaggacgctcttccttttactgcctggagtactttccttctcagatgctgcgtactggaaacaactttcagttcagctacacttttgaagacgtgcctttccacagcagctacgctcacagccagagtctggatcggctgatgaatcctctgatcgaccagtacctgtattatctgaacaagacacaaacaaatagtggaactcttcagcagtctcggctactgtttagccaagctggaccaaccaacatgtctcttcaagctaaaaactggctgcctggaccttgctacagacagcagcgtctgtcaaaacaggcaaacgacaacaacaacagcaactttccctggactgcagctacaaagtatcatctaaatggccgggactcgttggttaatccaggaccagctatggccagtcacaaggatgacgaagaaaagtttttccccatgcatggaaccctgatatttggtaaacaaggaacaaatgccaacgacgcggatttggaaaatgtcatgattacagatgaagaagaaatcagggccaccaatcccgtggctacggagcagtacgggactgtgtcaaataatttgcaaaactcaaacactggtccaactactggaactgtcaatcgccaaggagcgttacctggtatggtgtggcaggatcgagacgtgtacctgcagggacccatttgggccaagattcctcacaccgatggacactttcatccttctccactgatgggaggttttggactcaaacacccgcctcctcagatcatgatcaaaaacactcccgttccagccaatcctcccacaaacttcagttctgccaagtttgcttctttcatcacacagtattccacgggacaggtcagcgtggagatcgagtgggagctgcagaaggagaacagcaaacgctggaatcccgaaattcagtacacttccaactacaacaagtctgttaatgtggactttactgtggacactaatggtgtgtattcagagcctcgccccattggcaccagatacctgactcgtaatctgtaat

SEQ ID NO: 4866 - protein, 735 aa, Adeno-associated virus
MAADGYPPDWLEDTLSEGIRQWWKLKPGPPPPKPAERHKDDSRGLVLPGYKYLGPFNGLDKGEPVNEADAAALEHDKAYDRQLDSGDNPYLKYNHADAEFQERLKEDTSFGGNLGRAVFQAKKRVLEPLGLVEEPVKTAPGKKRPVEHSPVEPDSSSGTGKAGQRPARKRLNFGQTGDADSVPDPQPLGQPPAAPSGLGSTTMATGSGAPMADNNEGADGVGNSSGNWHCDSQWLGDRVITTSTRTWALPTYNNHLYKQISSQSGASNDNHYFGYSTPWGYFDFNRFHCHFSPRDWQRLINNNWGFRPKRLNFKLFNIQVKEVTQNDGTTTIANNLTSTVQVFTDSEYQLPYVLGSAHQGCLPPFPADVFMVPQYGYLTLNNGSQAVGRSSFYCLEYFPSQMLRTGNNFQFSYTFEDVPFHSSYAHSQSLDRLMNPLIDQYLYYLNKTQTNSGTLQQSRLLFSQAGPTNMSLQAKNWLPGPCYRQQRLSKQANDNNNSNFPWTAATKYHLNGRDSLVNPGPAMASHKDDEEKFFPMHGTLIFGKQGTNANDADLENVMITDEEEIRATNPVATEQYGTVSNNLQNSNTGPTTGTVNRQGALPGMVWQDRDVYLQGPIWAKIPHTDGHFHPSPLMGGFGLKHPPPQIMIKNTPVPANPPTNFSSAKFASFITQYSTGQVSVEIEWELQKENSKRWNPEIQYTSNYNKSVNVDFTVDTNGVYSEPRPIGTRYLTRNL

SEQ ID NO: 4867 - DNA, 2208 bp, Adeno-associated virus
atggctgccgatggttatcttccagattggctcgaggacactctctctgaaggaataagacagtggtggaagctcaaacctggcccaccaccaccaaagcccgcagagcggcataaggacgacagcaggggtcttgtgcttcctgggtacaggtacctcggacccttcaacggactcgacaagggagagccggtcaacgaggcagacgccgcggccctcgagcacgacaaggcctacgaccggcagctcgacagcggagacaacccgtacctcaagtacaaccacgtcgacgcggagtttcaggagcgtcttaaagaagatacgtcttttgggggcaacctcggacgagcagtcttccaggccaaaaagaggattcttgaacctctgggcctggttgaggaacctgttaaggcggctccgggagaaaagaggccggtagagcactctcctgcggagccagactcctcctcgggaaccggaaaagcgggccagcagcctgcaagaaagagattgaattttggtcagactggagacgcagactcagtacctgacccccagcctctcggacagccaccagcagccccctctggtctgggaactaatacgatggcttcaggcagtggcgcaccaatggcagacaataacgagggcgccgacggagtgggtaattcctcgggaaattggcattgcgattccacatggatgggcgacagagtcatcaccaccagcacccgcacctgggccctgcccacctacaacaaccatctgtacaagcaaatctccagccagtctggagccagcaacgacaaccactactttggctacagcaccccctgggggcattttgacttcaacagattccactgccacttctccccacgtgactggcaaagactcatcaacaacaactggggattccggcccaagagactcagcttcaagctctttaacattcaagtcaaagaggtcacgcagaatgacggtacgacgacgattgccaataaccttaccagcacggttcaggtgtttactgactcggagtaccagctcccgtacgtcctcggctcggcgcatcaaggatgcctcccgccgttcccagcagacgtcttcatggtgccacagtatggatacctcaccctgaacaacggcagtcaggcggtaggacgctcttccttttactgcctggagtactttccttctcagatgcttcgtaccggaaacaactttaccttcagctacacctttgaagacgttcctttccatagcagctacgctcacagccaaagtctggaccgtctcatgaatcctctcatcgaccagtacctgtattacttgagcagaacaaacactccaagcggaaccaccacgatgtccaggcttcagttttctcaggccggagcaagtgacattcgggaccagtctagaaactggcttcctggaccctgttaccgccagcagcgagtatcaaagacagctgcggacaacaacaacagtgattactcgtggactggagctaccaagtaccacctcaatggaagagactctctggtgaatccgggcccagctatggccagccacaaggacgatgaagaaaaatattttcctcagagcggggttctcatctttggaaaacaagactcgggaaaaactaatgtggacattgaaaaggttatgattacagacgaagaggaaatcaggaccaccaatcccgtggctacggagcagtatggttctgtatctaccaacctccagagcggcaacacacaagcagctacctcagatgtcaacacacaaggcgttcttccaggcatggtctggcaggacagagacgtgtacctgcaggggcccatctgggcaaagattccacacacggacggacattttcacccctctccccccatgggcggattcggacttaaacaccctcctccacaaattctcatcaagaacaccccggtacctgcgaatccttcgaccactttcagtgcggcaaagtttgcttccttcatcacacagtactccacggggcaggtcagcgtggagatcgagtgggagctgcagaaggagaacagcaaacgctggaatcccgaaattcagtacacttccaactacaacaaatctgttaatgtggactttactgtggacactaatggtgtgtattcagagcctcgccccattggcgccagatacctgactcgtaatctgtaa

SEQ ID NO: 4868 - protein, 735 aa, Adeno-associated virus
MAADGYLPDWLEDTLSEGIRQWWKLKPGPPPPKPAERHKDDSRGLVLPGYRYLGPFNGLDKGEPVNEADAAALEHDKAYDRQLDSGDNPYLKYNHVDAEFQERLKEDTSFGGNLGRAVFQAKKRILEPLGLVEEPVKAAPGEKRPVEHSPAEPDSSSGTGKAGQQPARKRLNFGQTGDADSVPDPQPLGQPPAAPSGLGTNTMASGSGAPMADNNEGADGVGNSSGNWHCDSTWMGDRVITTSTRTWALPTYNNHLYKQISSQSGASNDNHYFGYSTPWGHFDFNRFHCHFSPRDWQRLINNNWGFRPKRLSFKLFNIQVKEVTQNDGTTTIANNLTSTVQVFTDSEYQLPYVLGSAHQGCLPPFPADVFMVPQYGYLTLNNGSQAVGRSSFYCLEYFPSQMLRTGNNFTFSYTFEDVPFHSSYAHSQSLDRLMNPLIDQYLYYLSRTNTPSGTTTMSRLQFSQAGASDIRDQSRNWLPGPCYRQQRVSKTAADNNNSDYSWTGATKYHLNGRDSLVNPGPAMASHKDDEEKYFPQSGVLIFGKQDSGKTNVDIEKVMITDEEEIRTTNPVATEQYGSVSTNLQSGNTQAATSDVNTQGVLPGMVWQDRDVYLQGPIWAKIPHTDGHFHPSPPMGGFGLKHPPPQILIKNTPVPANPSTTFSAAKFASFITQYSTGQVSVEIEWELQKENSKRWNPEIQYTSNYNKSVNVDFTVDTNGVYSEPRPIGARYLTRNL

SEQ ID NO: 4869 - DNA, 2208 bp, Adeno-associated virus
atggctgccgatggttatcttccagattggctcgaggacaccctctctgaaggaataagacagtggtggaagctcaaacctggcccaccaccaccaaagcccgcagagcggcataaggacgacagcaggggtcttgtgcttcctgggtacaagtacctcggacccttcaacggactcgacaagggagagccggtcaacgaggcagacgccgcggccctcgagcacgacaaggcctacgaccggcagctcgacagcggagataacccgtacctcaagtacaaccacgccgacgcggagtttcaggagcgccttaaagaggatacgtcttttgggggcaacctcggacgagcagtcttccaggccaaaaagaggattcttgaacctctgggcctggttgaggaacctgttaagacggctccgggaaaaaagaggccggtagagcactctcctgcggagccagactcctcctcgggaaccggaaaagcgggccagcagcctgcaagaaagagattgaattttggtcagactggagacgcagactcagtacctgacccccggcctctcggacagccaccagcagccccctctggtctgggaactaatacgatggcttcaggcagtggcgcaccaatggcagacaataacgagggcgccgacggagtgggtaattcctcgggaaattggcattgcgattccacatggatgggcgacagagtcatcaccaccagcacccgcacctgggccctgcccacctacaacaaccatctgtacaagcaaatctccagccagtctggagccagcaacgacaaccactactttggctacagcaccccctgggggtattttgacttcaacagattccactgccacttctccccacgtgactggcaaagactcatcaacaacaactggggattccggcccaagagactcagcttcaagctctttaacattcaagtcaaagaggtcacgcagaatgacggtacgacgacgattgccaataaccttaccagcacggttcaggtgtttactgactcggagtaccagctcccgtacgtcctcggctcggcgcatcaaggatgcctcccgccgttcccagcagacgtcttcatggtgccacagtatggatacctcaccctgaacaacggcagtcaggcggtaggacgctcttccttttactgcctggagtactttccttctcagatgcttcgtaccggaaacaactttaccttcagctacacctttgaagacgttcctttccatagcagctacgctcacagccaaagtctggaccgtctcatgaatcctctcatcgaccagtacctgtattacttgagcagaacaaacactccaagcggaaccaccacgatgtccaggcttcagttttctcaggccggagcaagtgacattcgggaccagtctagaaactggcttcctggaccctgttaccgccagcagcgagtatcaaagacagctgcggacaacaacaacagtgattactcgtggactggagctaccaagtaccacctcaatggaagagactctctggtgaatccgggcccagctatggccagccacaaggacgatgaagaaaaatattttcctcagagcggggttctcatctttggaaaacaagactcgggaaaaactaatgtggacattgaaaaggttatgattacagacgaagaggaaatcaggaccaccaatcccgtggctacggagcagtatggttctgtatctaccaacctccagagcggcaacacacaagcagctacctcagatgtcaacacacaaggcgttcttccaggcatggtctggcaggacagagacgtgtacctgcaggggcccatctgggcaaagattccacacacggacggacattttcacccctctcccctcatgggcggattcggacttaaacaccctcctccacaaattctcatcaagaacaccccggtacctgcgaatccttcgaccactttcagtgcggcaaagtttgcttccttcatcacacagtactccacggggcaggtcagcgtggagatcgagtgggagctgcagaaggagaacagcaaacgctggaatcccgaaattcagtacacttccaactacaacaaatctgttaatgtggactttactgtggacactaatggtgtgtattcagagcctcgccccattggcaccagatacctgactcgtaatctgtaa

SEQ ID NO: 4870 - protein, 735 aa, Adeno-associated virus
MAADGYLPDWLEDTLSEGIRQWWKLKPGPPPPKPAERHKDDSRGLVLPGYKYLGPFNGLDKGEPVNEADAAALEHDKAYDRQLDSGDNPYLKYNHADAEFQERLKEDTSFGGNLGRAVFQAKKRILEPLGLVEEPVKTAPGKKRPVEHSPAEPDSSSGTGKAGQQPARKRLNFGQTGDADSVPDPRPLGQPPAAPSGLGTNTMASGSGAPMADNNEGADGVGNSSGNWHCDSTWMGDRVITTSTRTWALPTYNNHLYKQISSQSGASNDNHYFGYSTPWGYFDFNRFHCHFSPRDWQRLINNNWGFRPKRLSFKLFNIQVKEVTQNDGTTTIANNLTSTVQVFTDSEYQLPYVLGSAHQGCLPPFPADVFMVPQYGYLTLNNGSQAVGRSSFYCLEYFPSQMLRTGNNFTFSYTFEDVPFHSSYAHSQSLDRLMNPLIDQYLYYLSRTNTPSGTTTMSRLQFSQAGASDIRDQSRNWLPGPCYRQQRVSKTAADNNNSDYSWTGATKYHLNGRDSLVNPGPAMASHKDDEEKYFPQSGVLIFGKQDSGKTNVDIEKVMITDEEEIRTTNPVATEQYGSVSTNLQSGNTQAATSDVNTQGVLPGMVWQDRDVYLQGPIWAKIPHTDGHFHPSPLMGGFGLKHPPPQILIKNTPVPANPSTTFSAAKFASFITQYSTGQVSVEIEWELQKENSKRWNPEIQYTSNYNKSVNVDFTVDTNGVYSEPRPIGTRYLTRNL

SEQ ID NO: 4871 - DNA, 2208 bp, Adeno-associated virus
atggctgccgatggttatcttccagattggctcgaggacactctctctgaaggaataagacagtggtggaagctcaaacctggcccaccaccaccaaagcccgcagagcggcataaggacgacagcaggggtcttgtgcttcctgggtacaagtacctcggacccttcaacggactcgacaagggagagccggtcaacgaggcagacgccgcggccctcgagcacgacaaggcctacgaccggcagctcgacagcggagacaacccgtacctcaagtacaaccacgccgacgcggagtttcaggagcgccttaaaggagatacgtcttttgggggcaacctcggacgagcagtcttccaggccaaaaagaggattcttgaacctctgggcctggttgaggaacctgttaagacggctccgggaaaaaagaggccggtagagcactctcctgcggagccagactcctcctcgggaaccggaaaagcgggccagcagcctgcaagaaagagattgaattttggtcagactggagacgcagactcagtacctgacccccagcctctcggacagccaccagcagccccctctggtctgggaactaatacgatggcttcaggcagtggcgcaccaatggcagacaataacgagggcgccgacggagtgggtaattcctcgggaaattggcattgcgattccacatggatgggcggcagagtcatcaccaccagcacccgcacctgggccctgcccacctacaacaaccatctgtacaagcaaatctccagccagtctggagccagcaacgacaaccactactttggctacagcaccccctgggggtattttgacttcaacagattccactgccacttctccccacgtgactggcaaagactcatcaacaacaactggggattccggcccaagagactcagcttcaagctctttaacattcaagtcaaagaggtcacgcagaatgacggtacgacgacgattgccaataaccttaccagcacggttcaggtgtttactgactcggagtaccagctcccgtacgtcctcggctcggcgcatcaaggatgcctcccgccgttcccagcagacgtcttcatggtgccacagtatggatacctcaccctgaacaacggcagtcaggcggtaggacgctcttccttttactgcctggagtactttccttctcagacgcttcgtaccggaaacaactttaccttcagctacacctttgaagacgttcctttccatagcagctacgctcacagccaaagtctggaccgtctcatgaatcctctcatcgaccagtacctgtattacttgagcagaacaaacactccaagcggaaccaccacgatgtccaggcttcagttttctcaggccggagcaagtgacattcgggaccagtctagaaactggcttcctggaccctgttaccgccagcagcgagtatcaaagacagctgcggacaacaacaacagtgattactcgtggactggagctaccaagtaccacctcaatggaagagactctctggtgaatccgggcccagctatggccagccacaaggacgatgaagaaaaatattttcctcagagcggggttctcatctttggaaaacaagactcgggaaaaactaatgtggacattgaaaaggttatgattacagacgaagaggaaatcaggaccaccaatcccgtggctacggagcagtatggttctgtatctaccaacctccagagcggcaacacacaagcagctacctcagatgtcaacacacaaggcgttcttccaggcatggtctggcaggacagagacgtgtacctgcaggggcccatctgggcaaagattccacacacggacggacattttcacccctctcccctcatgggcggattcggacttaaacaccctcctccacaaattctcatcaagaacaccccggtacctgcgaatccttcgaccactttcagtgcggcaaagtttgcttccttcatcacacagtactccacggggcaggtcagcgtggagatcgagtgggagctgcagaaggagaacagcaaacgctggaatcccgaaattcagtacacttccaactacaacaaatctgttaatgtggactttactgtggacactaatggtgtgtattcagagcctcgccccattggcaccagatacctgactcgtaatctgtaa

SEQ ID NO: 4872 - protein, 735 aa, Adeno-associated virus
MAADGYLPDWLEDTLSEGIRQWWKLKPGPPPPKPAERHKDDSRGLVLPGYKYLGPFNGLDKGEPVNEADAAALEHDKAYDRQLDSGDNPYLKYNHADAEFQERLKGDTSFGGNLGRAVFQAKKRILEPLGLVEEPVKTAPGKKRPVEHSPAEPDSSSGTGKAGQQPARKRLNFGQTGDADSVPDPQPLGQPPAAPSGLGTNTMASGSGAPMADNNEGADGVGNSSGNWHCDSTWMGGRVITTSTRTWALPTYNNHLYKQISSQSGASNDNHYFGYSTPWGYFDFNRFHCHFSPRDWQRLINNNWGFRPKRLSFKLFNIQVKEVTQNDGTTTIANNLTSTVQVFTDSEYQLPYVLGSAHQGCLPPFPADVFMVPQYGYLTLNNGSQAVGRSSFYCLEYFPSQTLRTGNNFTFSYTFEDVPFHSSYAHSQSLDRLMNPLIDQYLYYLSRTNTPSGTTTMSRLQFSQAGASDIRDQSRNWLPGPCYRQQRVSKTAADNNNSDYSWTGATKYHLNGRDSLVNPGPAMASHKDDEEKYFPQSGVLIFGKQDSGKTNVDIEKVMITDEEEIRTTNPVATEQYGSVSTNLQSGNTQAATSDVNTQGVLPGMVWQDRDVYLQGPIWAKIPHTDGHFHPSPLMGGFGLKHPPPQILIKNTPVPANPSTTFSAAKFASFITQYSTGQVSVEIEWELQKENSKRWNPEIQYTSNYNKSVNVDFTVDTNGVYSEPRPIGTRYLTRNL

SEQ ID NO: 4873 - DNA, 2208 bp, Adeno-associated virus
atggctgccgatggttatcttccagattggctcgaggacactctctctgaaggaataagacagtggtggaagctcaaacctggcccaccaccaccaaagcccgcagagcggcataaggacgacagcaggggtcttgtgcttcctgggtacaagtacctcggacccttcaacggactcgacaagggagagccggtcaacgaggcagacgccgcggccctcgagcacgacaaggcctacgaccggcagctcgacagcggagacaacccgtacctcaagtacaaccacgccgacgcggagtttcaggagcgtcttaaagaagatacgtcttttgggggcaacctcggacgagcagtcttccaggccaaaaagaggattcttgaacctctgggcctggttgaggaacctgttaagacggctccgggaaaaaagaggccggtagagcactctcctgcggagccagactcctcctcgggaaccggaaaagcgggccagcagcctgcaagaaagagattgaattttggtcagactggagacgcagactcagtacctgacccccagcctctcggacagccaccagcagccccctctggtctgggaactaatacgatggcttcaggcagtggcgcaccaatggcagacaataacgagggcgccgacggagtgggtaattcctcgggaaattggcattgcgattccacatggatgggcgacagagtcatcaccaccagcacccgcacctgggccctgcccacctgcaacaaccatctgtacaagcaaatctccagccagtctggagccagcaacgacaaccactactttggctacagcaccccctgggggtattttgacttcaacagattccactgccacttctccccacgtgactggcaaagactcatcaacaacaactggggattccggcccaagagactcagcttcaagctctttaacattcaagtcaaagaggtcacgcagaatgacggtacgacgacgattgccaataaccttaccagcacggttcaggtgtttactgactcggagtaccagctcccgtacgtcctcggctcggcgcatcaaggatgcctcccgccgttcccagcagacgtcttcatggtgccacagtatggatacctcaccctgaacaacggcagtcaggcggtaggacgctcttccttttactgcctggagtattttccttctcagatgcttcgtaccggaaacaactttaccttcagctacacctttgaagacgttcctttccatagcagctacgctcacagccaaagtctggaccgtctcatgaatcctctcatcgaccagtacctgtattacttgagcagaacaaacactccaagcggaaccaccacgatgtccaggcttcagttttctcaggccggagcaagtgacattcgggaccagtctagaaactggcttcctggaccctgttaccgccagcagcgagtatcaaagacagctgcggacaacaacaacagtgattactcgtggactggagctaccaagtaccacctcaatggaagagactctctggtgaatccgggcccagctatggccagccacaaggacgatgaagaaaaatattttcctcagagcggggttctcatctttggaaaacaagactcgggaaaaactaatgtggacattgaaaaggttatgattacagacgaagaggaaatcaggaccaccaatcccgtggctacggagcagtatggttctgtatctacctacctccagagcggcaacacacaagcagctacctcagatgtcaacacacaaggcgttcttccaggcatggtctggcaggacagagacgtgtacctgcgggggcccatctgggcaaagattccacacacggacggacattttcacccctctcccctcatgggcggatttggacttaaacaccctcctccacaaattctcatcaagaacaccccggtacctgcgaatccttcgaccactttcagtgcggcaaagtttgcttccttcatcacacagtactccacggggcaggtcagcgtggagatcgagtgggagctgcagaaggagaacagcaaacgctggaatcccgaaattcagtacacttccaactacaacaaatctgttaatgtggactttactgtggacactaatggtgtgtattcagagcctcgccccattggcaccagatacctgactcgtaatctgtaa

SEQ ID NO: 4874 - protein, 735 aa, Adeno-associated virus
MAADGYLPDWLEDTLSEGIRQWWKLKPGPPPPKPAERHKDDSRGLVLPGYKYLGPFNGLDKGEPVNEADAAALEHDKAYDRQLDSGDNPYLKYNHADAEFQERLKEDTSFGGNLGRAVFQAKKRILEPLGLVEEPVKTAPGKKRPVEHSPAEPDSSSGTGKAGQQPARKRLNFGQTGDADSVPDPQPLGQPPAAPSGLGTNTMASGSGAPMADNNEGADGVGNSSGNWHCDSTWMGDRVITTSTRTWALPTCNNHLYKQISSQSGASNDNHYFGYSTPWGYFDFNRFHCHFSPRDWQRLINNNWGFRPKRLSFKLFNIQVKEVTQNDGTTTIANNLTSTVQVFTDSEYQLPYVLGSAHQGCLPPFPADVFMVPQYGYLTLNNGSQAVGRSSFYCLEYFPSQMLRTGNNFTFSYTFEDVPFHSSYAHSQSLDRLMNPLIDQYLYYLSRTNTPSGTTTMSRLQFSQAGASDIRDQSRNWLPGPCYRQQRVSKTAADNNNSDYSWTGATKYHLNGRDSLVNPGPAMASHKDDEEKYFPQSGVLIFGKQDSGKTNVDIEKVMITDEEEIRTTNPVATEQYGSVSTYLQSGNTQAATSDVNTQGVLPGMVWQDRDVYLRGPIWAKIPHTDGHFHPSPLMGGFGLKHPPPQILIKNTPVPANPSTTFSAAKFASFITQYSTGQVSVEIEWELQKENSKRWNPEIQYTSNYNKSVNVDFTVDTNGVYSEPRPIGTRYLTRNL

SEQ ID NO: 4875 - DNA, 2208 bp, Adeno-associated virus; identical to SEQ ID NO: 4869

SEQ ID NO: 4876 - protein, 735 aa, Adeno-associated virus; identical to SEQ ID NO: 4870

SEQ ID NO: 4877 - DNA, 2208 bp, Adeno-associated virus
atggctgccgatggttatcttccagattggctcgaggacactctctctgaaggaataagacagtggtggaagctcaaacctggcccaccaccaccaaagcccgcagagcggcataaggacggcagcaggggtcttgtgcttcctgggtacaagtacctcggacccttcaacggactcgacaagggagagccggtcaacgaggcagacgccgcggccctcgagcacgacaaggcctacgaccggcagctcaacagcggagacaacccgtacctcaagtacaaccacgccgacgcggagtttcaggagcgccttaaagaagatacgtcttttgggggcaacctcggacgagcagtcttccaggcaaaaaagagggttcttgaacctctgggcctggttgaggagcctgttaaaacggctccgggaaaaaagagaccggtagagcactctcctgcggagccagactcctcctcgggaaccggaaaagcgggccagcagcctgcaagaaagagattgaattttggtcagactggagacgcagactccgtacctgacccccagcctctcggacagccaccagcagccccctctggtctgggatctactacaatggctacaggcagtggcgcaccaatggcagacaataacgagggtgccgatggagtgggtaattcctcaggaaattggcattgcgattcccaatggctgggcgacagagtcatcaccacaagcactcgaacctgggccctgcccacctacaacaaccacctctacaagcaaatctccagccaatcaggagcctcaaacgacaaccactattttggctacagcaccccttgggggtattttgacttcaacagattccactgccacttttcaccacgtgactggcaaagactcatcaacaacaactggggattccgacccaagagactcaacttcaagctctttaacattcaagtcaaagaggtcacgcagaatgacggtacgacgacgattgccaataaccttaccagcacggttcaggtgtttactgactcggagtaccagctcccgtacgtcctcggctcggcgcatcaaggatgcctcccgccgttcccagcggacgtcttcatggtcccacagtatggatacctcaccctgaacaacgggagtcaggcggtaggacgctctcccttttactgcctggagtactttccttctcagatgctgcgtactggaaacaactttcagttcagctacacttttgaagacgtgcctttccacagcagctacgctcacagccagagtctggatcggctgatgaatcctctgatcgaccagtacctgtattatctgaacaagacacaaacaaatagtggaactcttcagcagtctcggctactgtttagccaagctggacccaccaacatgtctcttcaagctaaaaactggctgcctggaccttgctacagacagcagcgtctgtcaaagcaggcaaacgacaacaacaacagcaactttccctggactgcagctacaaagtatcatctaaatggccgggactcgttggttaatccaggaccagctatggccagtcacaaggatgacgaagaaaagtttttccccatgcatggaaccctgatatttggtaaacaaggaacaaatgccaacgacgcggatttggaaaatgtcatgattacagatgaagaagaaatcaggaccaccaatcccgtggctacggagcagtacgggactgtgtcaaataatttgcaaaactcaaacactggtccaactactggaactgtcaatcaccaaggagcgttacctggtatggtgtggcaggatcgagatgtgtaccttcagggacccatttgggccaagattcctcacaccgatggacactttcatccttctccactgatgggaggttttggactcaaacacccgcctcctcagattatgatcaaaaacactcccgttccagccaatcctcctacaaacttcagttctgccaagtttgcttctttcatcacacagtattccacggggcaggtcagcgtggagatcgagtgggagctgcagaaggagaacagcaaacgctggaatcccgaaattcagtacacttccaactacaacaaatctgttaatgtggactttactgtggacaataatggcgtgtactcagagcctcgccccattggcaccagatacctgactcgtaatctgtaa

SEQ ID NO: 4878 - protein, 735 aa, Adeno-associated virus
MAADGYLPDWLEDTLSEGIRQWWKLKPGPPPPKPAERHKDGSRGLVLPGYKYLGPFNGLDKGEPVNEADAAALEHDKAYDRQLNSGDNPYLKYNHADAEFQERLKEDTSFGGNLGRAVFQAKKRVLEPLGLVEEPVKTAPGKKRPVEHSPAEPDSSSGTGKAGQQPARKRLNFGQTGDADSVPDPQPLGQPPAAPSGLGSTTMATGSGAPMADNNEGADGVGNSSGNWHCDSQWLGDRVITTSTRTWALPTYNNHLYKQISSQSGASNDNHYFGYSTPWGYFDFNRFHCHFSPRDWQRLINNNWGFRPKRLNFKLFNIQVKEVTQNDGTTTIANNLTSTVQVFTDSEYQLPYVLGSAHQGCLPPFPADVFMVPQYGYLTLNNGSQAVGRSPFYCLEYFPSQMLRTGNNFQFSYTFEDVPFHSSYAHSQSLDRLMNPLIDQYLYYLNKTQTNSGTLQQSRLLFSQAGPTNMSLQAKNWLPGPCYRQQRLSKQANDNNNSNFPWTAATKYHLNGRDSLVNPGPAMASHKDDEEKFFPMHGTLIFGKQGTNANDADLENVMITDEEEIRTTNPVATEQYGTVSNNLQNSNTGPTTGTVNHQGALPGMVWQDRDVYLQGPIWAKIPHTDGHFHPSPLMGGFGLKHPPPQIMIKNTPVPANPPTNFSSAKFASFITQYSTGQVSVEIEWELQKENSKRWNPEIQYTSNYNKSVNVDFTVDNNGVYSEPRPIGTRYLTRNL

SEQ ID NO: 4879 - DNA, 2208 bp, Adeno-associated virus
atggctgccgatggttatcttccagattggctcgaggacactctctctgaaggaataagacagtggtggaagctcaaacctggcccaccaccaccaaagcccgcagagcggcataaggacgacagcaggggtcttgtgcttcctgggtacaagtacctcggacccttcaacggactcgacaagggagagccggtcaacgaggcagacgccgcggccctcgagcacgacaaggcctacgaccggcagctcgacagcggagacaacccgtacctcaagtacaaccacgccgacgcggagtttcaggagcgtcttaaagaagatacgtcttttgggggcaacctcggacgagcagtcttccaggccaaaaagaggattcttgaacctctgggcctggttgaggaacctgttaagacggctccgggaaaaaagaggccggtagagcactctcctgcggagccagactcctcctcgggaaccggaaaagcgggccagcagcctgcaagaaagagattgaattttggtcagactggagacgcagactcagtacctgacccccagcctctcggacagccaccagcagccccctctggtctgggaactaatacgatggcttcaggcagtggcgcaccaatggcagacaataacgagggcgccgacggagtgggtaattcctcgggaaattggcattgcgattccacatggatgggcgacagagtcatcaccaccagcacccgcacctgggccctgcccacctacaacaaccatctgtacaagcaaatctccagccagtctggagccagcaacgacaaccactactttggctacagcaccccctgggggtattttgacttcaacagattccactgccacttctccccacgtgactggcaaagactcatcaacaacaactggggattccggcccaagagactcagcttcaagctctttaacattcaagtcaaagaggtcacgcagaatgacggtacgacgacgattgccaataaccttaccagcacggttcaggtgtttactgactcggagtaccagctcccgtacgtcctcggctcggcgcatcaaggatgcctcccgccgttcccagcagacgtcttcatggtgccacagtatggatacctcaccctgaacaacggcagtcaggcggtaggacgctcttccttttactgcctggagtactttccttctcagatgcttcgtaccggaaacaactttaccttcagctacacctttgaagacgttcctttccatagcagctacgctcacagccaaagtctggaccgtctcatgaatcctctcatcgaccagtacctgtattacttgagcagaacaaacactccaagcggaaccaccacgatgtccaggcttcagttttctcaggccggagcaagtgacattcgggaccagtctagaaactggcttcctggaccctgttaccgccagcagcgagtatcaaagacagctgcggacaacaacaacagtgattactcgtggactggagctaccaagtaccacctcaatggaagagactctctggtgaatccgggcccagctatggccagccacaaggacgatgaagaaaaatattttcctcagagcggggttctcatctttggaaaacaagactcgggaaaaactaatgtggacattgaaaaggttatgattacagacgaagaggaaatcaggaccaccaatcccgtggctacggagcagtatggttctgtatctaccaacctccagagcggcaacacacaagcagctacctcagatgtcaacacacaaggcgttcttccaggcatggtctggcaggacagagacgtgtacctgcaggggcccatctgggcaaagattccacacacggacggacattttcacccctctcccctcatgggcggattcggacttaaacaccctcctccacaaattctcatcaagaacaccccggtacctgcgaatccttcgaccactttcagtgcggcaaagtttgcttccttcatcacacagtactccacggggcaggtcagcgtggagatcgagtgggagctgcagaaggagaacagcaaacgctggaatcccgaaattcagtacacttccaactacaacaaatctgttaatgtggactttactgtggacactaatggtgtgtattcagagcctcgccccattggcaccagatacctgactcgtaatctgtaa

SEQ ID NO: 4880 - protein, 735 aa, Adeno-associated virus
MAADGYLPDWLEDTLSEGIRQWWKLKPGPPPPKPAERHKDDSRGLVLPGYKYLGPFNGLDKGEPVNEADAAALEHDKAYDRQLDSGDNPYLKYNHADAEFQERLKEDTSFGGNLGRAVFQAKKRILEPLGLVEEPVKTAPGKKRPVEHSPAEPDSSSGTGKAGQQPARKRLNFGQTGDADSVPDPQPLGQPPAAPSGLGTNTMASGSGAPMADNNEGADGVGNSSGNWHCDSTWMGDRVITTSTRTWALPTYNNHLYKQISSQSGASNDNHYFGYSTPWGYFDFNRFHCHFSPRDWQRLINNNWGFRPKRLSFKLFNIQVKEVTQNDGTTTIANNLTSTVQVFTDSEYQLPYVLGSAHQGCLPPFPADVFMVPQYGYLTLNNGSQAVGRSSFYCLEYFPSQMLRTGNNFTFSYTFEDVPFHSSYAHSQSLDRLMNPLIDQYLYYLSRTNTPSGTTTMSRLQFSQAGASDIRDQSRNWLPGPCYRQQRVSKTAADNNNSDYSWTGATKYHLNGRDSLVNPGPAMASHKDDEEKYFPQSGVLIFGKQDSGKTNVDIEKVMITDEEEIRTTNPVATEQYGSVSTNLQSGNTQAATSDVNTQGVLPGMVWQDRDVYLQGPIWAKIPHTDGHFHPSPLMGGFGLKHPPPQILIKNTPVPANPSTTFSAAKFASFITQYSTGQVSVEIEWELQKENSKRWNPEIQYTSNYNKSVNVDFTVDTNGVYSEPRPIGTRYLTRNL

SEQ ID NO: 4881 - DNA, 2208 bp, Adeno-associated virus
atggctgccgatggttatcttccagattggctcgaggacactctctctgaaggaataagacagtggtggaagctcaaacctggcccaccaccaccaaagcccgcagagcggcataaggacgacagcaggggtcttgtgcttcctgggtacaagtacctcggacccttcaacggactcgacaagggagagccggtcaacgaggcagacgccgcggccctcgagcacgacaaggcctacgaccggcagctcgacagcggagacaacccgtacctcaagtacaaccacgccgacgcggagtttcaggagcgtcttaaagaagatacgtcttttgggggcaacctcggacgagcagtcttccaggccaaaaagaggattcttgaacctctgggcctggttgaggaacctgttaagacggctccgggaaaaaagaggccggtagagcactctcctgcggagccagactcctcctcgggaaccggaaaagcgggccagcagcctgcaagaaagagattgaattttggtcagactggagacgcagactcagtacctgacccccagcctctcggacagccaccagcagccccctctggtctgggaactaatacgatggcttcaggcagtggcgcaccaatggcagacaataacgagggcgccgacggagtgggtaattcctcgggaaattggcattgcgattccacatggatgggcgacagagtcatcaccaccagcacccgcacctgggccctgcccacctacaacaaccatctgtacaagcaaatctccagccagtctggagccagcaacgacaaccactactttggctacagcaccccctgggggtatttcgacttcaacagattccactgccacttctccccacgtgactggcaaagactcatcaacaacaactggggattccggcccaagagactcagcttcaagctctttaacattcaagtcaaagaggtcacgcagaatgacggtacgacgacgattgccaataaccttaccagcacggttcaggtgtttactgactcggggtaccagctcccgtacgtcctcggctcggcgcatcaaggatgccttccgccgttcccagcagacgtcttcatggtgccacagtatggatacctcaccctgaacaacggcagtcaggcggtaggacgctcttccttttactgcctggagtactttccttctcagatgcttcgtaccggaaacaactttaccttcagctacacctttgaagacgttcctttccatagcagctacgctcacggccaaagtctggaccgtctcatgaatcctctcatcgaccagtacctgtattacttgagcagaacaaacactccaagcggaaccaccacgatgtccaggcttcagttttctcaggccggagcaagtgacgttcgggaccagtctagaaactggcttcctggaccctgttaccgccagcagcgagtatcaaagacagctgcggacaacaacaacagtgattactcgtggactggagctaccaagtaccacctcaatggaagagactctctggtgaatccgggcccagctatggccagccacaaggacgatgaagaaaaatattttcctcagagcggggttctcgtctttggaaaacaagactcgggaaaaactaatgtggacattgaaaaggttatgattacagacgaagaggaaatcaggaccaccaatcccgcggctacggagcagtatggttctgtatctaccaacctccagagcggcaacacacaagcagctacctcagatgtcaacacacaaggcgttcttccaggcatggtctggcaggacagagacgtgtacctgcaggggcccatctgggcaaagattccacacacggacggacattttcacccctctcccctcatgggcggattcggacttaaacaccctcctccacaaattctcatcaagaacaccccggtacctgcgaatccttcgaccactttcagtgcggcaaagtttgtttccttcatcacacagtactccacggggcaggtcagcgtggagatcgagtgggagctgcagaaggagaacagcaaacgctggaatcccgaaattcagtacacttccaactacaacaaatctgttaatgtggactttactgtggacactaatggtgtgtattcagagcctcgccccattggcaccagatacctgactcgtaatctgtaa

SEQ ID NO: 4882 - protein, 735 aa, Adeno-associated virus
MAADGYLPDWLEDTLSEGIRQWWKLKPGPPPPKPAERHKDDSRGLVLPGYKYLGPFNGLDKGEPVNEADAAALEHDKAYDRQLDSGDNPYLKYNHADAEFQERLKEDTSFGGNLGRAVFQAKKRILEPLGLVEEPVKTAPGKKRPVEHSPAEPDSSSGTGKAGQQPARKRLNFGQTGDADSVPDPQPLGQPPAAPSGLGTNTMASGSGAPMADNNEGADGVGNSSGNWHCDSTWMGDRVITTSTRTWALPTYNNHLYKQISSQSGASNDNHYFGYSTPWGYFDFNRFHCHFSPRDWQRLINNNWGFRPKRLSFKLFNIQVKEVTQNDGTTTIANNLTSTVQVFTDSGYQLPYVLGSAHQGCLPPFPADVFMVPQYGYLTLNNGSQAVGRSSFYCLEYFPSQMLRTGNNFTFSYTFEDVPFHSSYAHGQSLDRLMNPLIDQYLYYLSRTNTPSGTTTMSRLQFSQAGASDVRDQSRNWLPGPCYRQQRVSKTAADNNNSDYSWTGATKYHLNGRDSLVNPGPAMASHKDDEEKYFPQSGVLVFGKQDSGKTNVDIEKVMITDEEEIRTTNPAATEQYGSVSTNLQSGNTQAATSDVNTQGVLPGMVWQDRDVYLQGPIWAKIPHTDGHFHPSPLMGGFGLKHPPPQILIKNTPVPANPSTTFSAAKFVSFITQYSTGQVSVEIEWELQKENSKRWNPEIQYTSNYNKSVNVDFTVDTNGVYSEPRPIGTRYLTRNL

SEQ ID NO: 4883 - DNA, 2208 bp, Adeno-associated virus
atggctgccgatggttatcttccagattggctcgaggacactctctctgaaggaataagacagtggtggaaactcaaacctggcccaccaccaccaaagcccgcagagcggcataaggacgacagcaggggtcttgtgcttcctgggtacaagtacctcggacccttcaacggactcgacaagggagagccggtcaacgaggcagacgccgcggccctcgagcacgacaaggcctacgaccggcagctcgacagcggagacaacccgtacctcaagtacaaccacgccgacgcggagtttcaggagcgccttaaagaagatacgtcttttgggggcaacctcggacgagcagtcttccaggcaaaaaagagggttctggaacctctgagcctggttgaggagcctgttaagacggctccgggaaaaaagaggccggtagagcactctcccgcagagccagattcctcctccggaactggaaagtcgggcaaccagcctgcaagaaagagattgaatttcggtcagactggagactcagactccgtacctgacccccagcctctcggacagccaccagcagccccctctggtctgggaactaatacgatggctacaggcagtggcgcaccaatggcagacaataacgagggcgccgacggagtgggtaattcctcgggaaattggcattgcgattccacatggatgggcgacagagtcatcaccaccagcacccgaacctgggccctgcccacctacaacaaccatctgtacaagcaaatatccagccagtctggagccagcaacgacaatcactactttggctacagcaccccctgggggtattttgacttcaacagattccactgccacttttcaccacgtgactggcaaagactcatcaacaacaactggggattccgacccaagagactcaacttcaagctctttaacattcaagtcaaagaggtcacgcagaatgacggtacgacgacgattgccaataaccttaccagcacggttcaggtgtttactgactcggagtaccagctcccgtacgtcctcggctcggcgcatcaaggatgcctcccgccgttcccagcagacgtcttcatggtgccacagtatggatacctcaccctgaacaacgggagtcaggcagtaggacgctcttcattttactgcctagagtactttccttctcagatgctgcgtaccggaaacaactttaccttcagctacacctttgaggacgttcctttccacagcagctacgctcacagccagagtttggaccgtctcatgaatcctctcatcgaccagtacctgtattacttgagcagaacaaacactccaagcggaaccaccacgcagtccaggcttcagttttctcaggccggagcgagtgacattcaggaccagtctaggaactggcttcctggaccctgttaccgtcagcagcgagtatcaaagacatctgcggataacaacaacagtgaatactcgtggactggagctaccaagtaccacctcaatggcagagactctctggtgaatccgggcccggccatggccagccacaaagacgatgaagaaaagttttttcctcagagcggggttcttatctttgggaagcaaggctcagagaaaacaaatgtggatattgaaaaggtcatgattacagacgaagaggaaatcaggaccaccaatcccgtggctacggagcagtatggttctgtatctaccaacctccagagcggcaacacacaagcagctaccgcagatgtcaacacacaaggcgttcttccaggcatggtcgggcaagacagagacgtgtacctgcaggggcctacttgggcaaagattccacacacggacggacattttcacccctctcccctcatgggcggatttggacttaaacaccctcctccacagattctcatcaagaacaccccggtacctgcgaatccttcgaccaccttcagtgcggcaaagtttgcttccttcattacacagtactccacggggcaggtcagcgtggagatcgagtgggagctgcagaaggagaacagcaaacgctggaatcccgagatccagtacacttccaactacaacaagtctgttaatgtggactttactgtggacactaatggcgtgtattcagagcctcgccccattggcaccagatacctgactcgtaatctgtaa

SEQ ID NO: 4884 - protein, 735 aa, Adeno-associated virus
MAADGYLPDWLEDTLSEGIRQWWKLKPGPPPPKPAERHKDDSRGLVLPGYKYLGPFNGLDKGEPVNEADAAALEHDKAYDRQLDSGDNPYLKYNHADAEFQERLKEDTSFGGNLGRAVFQAKKRVLEPLSLVEEPVKTAPGKKRPVEHSPAEPDSSSGTGKSGNQPARKRLNFGQTGDSDSVPDPQPLGQPPAAPSGLGTNTMATGSGAPMADNNEGADGVGNSSGNWHCDSTWMGDRVITTSTRTWALPTYNNHLYKQISSQSGASNDNHYFGYSTPWGYFDFNRFHCHFSPRDWQRLINNNWGFRPKRLNFKLFNIQVKEVTQNDGTTTIANNLTSTVQVFTDSEYQLPYVLGSAHQGCLPPFPADVFMVPQYGYLTLNNGSQAVGRSSFYCLEYFPSQMLRTGNNFTFSYTFEDVPFHSSYAHSQSLDRLMNPLIDQYLYYLSRTNTPSGTTTQSRLQFSQAGASDIQDQSRNWLPGPCYRQQRVSKTSADNNNSEYSWTGATKYHLNGRDSLVNPGPAMASHKDDEEKFFPQSGVLIFGKQGSEKTNVDIEKVMITDEEEIRTTNPVATEQYGSVSTNLQSGNTQAATADVNTQGVLPGMVGQDRDVYLQGPTWAKIPHTDGHFHPSPLMGGFGLKHPPPQILIKNTPVPANPSTTFSAAKFASFITQYSTGQVSVEIEWELQKENSKRWNPEIQYTSNYNKSVNVDFTVDTNGVYSEPRPIGTRYLTRNL

SEQ ID NO: 4885 - DNA, 2208 bp, Adeno-associated virus
atggctgccgatggttatcttccagattggctcgaggacactctctctgaaggaataagacagtggtggaagctcaaacctggcccaccaccaccaaagcccgcagagcggcataaggacgacagcaggggtcttgtgcttcctgggtacaagtacctcggacccttcaacggactcgacaagggagagccggtcaacgaggcagacgccgcggccctcgagcacgacaaggcctacgaccggcagctcgacagcggagacaacccgtacctcaagtacaaccacgccgacgcagagtttcaggagcgccttaaagaagatacgtcttttgggggcaacctcggacgagcagtcttccaggcaaaaaagagggttctggaacctctgggcctggttgaggagcctgttaagacggctccgggaaaaaagaggccggtagagcactctcctgcagagccagattcctcctccggaactggaaagtcgggcaaccagcctgcaagaaagagattgaatttcggtcagactggagactcagactccgtacctgacccccagcctctcggacagccaccagcagccccctctggtctgggaactaatacgatggctacaggcagtggcgcaccaatggcagacaataacgagggcgccgacggagtgggtaattcctcgggaaattggcattgcgattccacatggatgggcgacagagtcatcaccaccagcacccgaacctgggccctgcccacctacaacaaccatctgtacaagcaaatatccagccagtctggagccagcaacgacaatcactactttggctacagcaccccctgggggtattttgacttcaacagattccactgccacttttcaccacgtgactggcaaagactcatcaacaacaactggggattccgacccaagagactcaacttcaagctctttaacattcaagtcaaagaggtcacgcagaatgacggtacgacgacgattgccaataaccttaccagcacggttcaggtgtttactgactcggagtaccagctcccgtacgtcctcggctcggcgcatcaaggatgcctcccgccgttcccagcagacgtcttcatggtgccacagtatggatacctcaccctgaacaacgggagtcaggcagtaggacgctcttcattttactgcctagggtactttccttctcagatgctgcgtaccggaaacaactttaccttcagctacacctttgaggacgttcctttccacagcagctacgctcacagccagagtttggaccgtctcatgaatcctctcatcgaccagtacctgtattacttgagcagaacaaacactccaagcggaaccaccacgcagtccaggcttcagttttctcaggccggagcgagtgacattcgggaccagtctaggaactggcttcctggaccctgttaccgtcagcagcgagtatcaaagacatctgcggataacaacaacagtgaatactcgtggactggagctaccaagtaccacctcaatggcagagactctctggtgaatccgggcccggccatggccagccacaaagacgatgaagaaaagttttttcctcagagcggggttcttatctttgggaagcaaggcccagagaaaacaaatgtggatattgaaaaggtcatgattacagacgaagaggaaatcaggaccaccaatcccgtggctacggagcagtatggttctgtatctaccaacctccagagcggcaacacacaagcagctaccgcagatgtcaacacacaaggcgttcttccaggcatggtctggcaagacagagacgtgtacctgcaggggcctatttgggcaaagattccacacacggacggacattttcacccctctcccctcatgggcggatttggacttaaacaccctcctccacagattctcatcaagaacaccccggtacctgcgaatccttcgaccaccttcagtgcggcaaagtttgcttccttcattacacagtactccacggggcaggtcagcgtggagatcgagtgggagctgcagaaggagaacagcaaacgctggaatcccgagatccagtacacttccaactacaacaagtctgttaatgtggactttactgtggacactaatggcgtgtattcagagcctcgccccattggcaccagatacctgactcgtaatctgtaa

SEQ ID NO: 4886 - protein, 735 aa, Adeno-associated virus
MAADGYLPDWLEDTLSEGIRQWWKLKPGPPPPKPAERHKDDSRGLVLPGYKYLGPFNGLDKGEPVNEADAAALEHDKAYDRQLDSGDNPYLKYNHADAEFQERLKEDTSFGGNLGRAVFQAKKRVLEPLGLVEEPVKTAPGKKRPVEHSPAEPDSSSGTGKSGNQPARKRLNFGQTGDSDSVPDPQPLGQPPAAPSGLGTNTMATGSGAPMADNNEGADGVGNSSGNWHCDSTWMGDRVITTSTRTWALPTYNNHLYKQISSQSGASNDNHYFGYSTPWGYFDFNRFHCHFSPRDWQRLINNNWGFRPKRLNFKLFNIQVKEVTQNDGTTTIANNLTSTVQVFTDSEYQLPYVLGSAHQGCLPPFPADVFMVPQYGYLTLNNGSQAVGRSSFYCLGYFPSQMLRTGNNFTFSYTFEDVPFHSSYAHSQSLDRLMNPLIDQYLYYLSRTNTPSGTTTQSRLQFSQAGASDIRDQSRNWLPGPCYRQQRVSKTSADNNNSEYSWTGATKYHLNGRDSLVNPGPAMASHKDDEEKFFPQSGVLIFGKQGPEKTNVDIEKVMITDEEEIRTTNPVATEQYGSVSTNLQSGNTQAATADVNTQGVLPGMVWQDRDVYLQGPIWAKIPHTDGHFHPSPLMGGFGLKHPPPQILIKNTPVPANPSTTFSAAKFASFITQYSTGQVSVEIEWELQKENSKRWNPEIQYTSNYNKSVNVDFTVDTNGVYSEPRPIGTRYLTRNL

SEQ ID NO: 4887 - protein, 735 aa, Adeno-associated virus
MAADGYLPDWLEDTLSEGIRQWWKLKPGPPPPKPAERHKDDSRGLVLPGYKYLGPFNGLDKGEPVNEADAAALEHDKAYDRQLDSGDNPYLKYNHADAEFQERLKEDTSFGGNLGRAVFQAKKRVLEPLGLVEEPVKTAPGKKRPVEHSPAEPDSSSGTGKSGNQPARKRLNFGQTGDSDSVPDPQPLGQPPAAPSGLGTNTMATGSGAPMADNNEGADGVGNSSGNWHCDSTWMGDRVITTSTRTWALPTYNNHLYKQISSQSGASNDNHYFGYSTPWGYFDFNRFHCHFSPRDWQRLINNNWGFRPKRLNFKLFNIQVKEVTQNDGTTTIANNLTSTVQVFTDSEYQLPYVLGSAHQGCLPPFPADVFMVPQYGYLTLNNGSQAVGRSSFYCLEYFPSQMLRTGNNFTFSYTFEDVPFHSSYAHSQSLDRLMNPLIDQYLYYLSRTNTPSGTTTQSRLQFSQAGASDIRDQSRNWLPGPCYRQQRVSKTSADNNNSEYSWTGATKYHLNGRDSLVNPGPAMASHKDDEEKFFPQSGVLIFGKQGPEKTNVDIEKVMITDEEEIRTTNPVATEQYGSVSTNLQSGNTQAATADVNTQGVLPGMVWQDRDVYLQGPIWAKIPHTDGHFHPSPLMGGFGLKHPPPQILIKNTPVPANPSTTFSAAKFASFITQYSTGQVSVEIEWELQKENSKRWNPEIQYTSNYNKSVNVDFTVDTNGVYSEPRPIGTRYLTRNL

SEQ ID NO: 4888 - protein, 735 aa, Adeno-associated virus; identical to SEQ ID NO: 4887

SEQ ID NO: 4889 - DNA, 2211 bp, Adeno-associated virus
atggctgccgatggttatcttccagattggctcgaggacactctctctgaaggaataagacagtggtggaagctcaaacctggcccaccaccaccaaagcccgcagagcggcataaggacgacagcaggggtcttgtgcttcctgggtacaagtacctcggacccttcaacggactcgacaagggggagccggtcaacgaggcagacgccgcggccctcgagcacgacaaggcctacgaccggcagctcgacagcggagacaacccgtacctcaagtacaaccacgccgacgcagagtttcaggagcgccttaaagaagatacgtcttttgggggcaacctcggacgagcagtcttccaggcgaaaaagagggttcttgaacctctgcggcctggtttgaggaaacctgttaagacggctccgggaaaaaagaggccggtagagcactctcctgtggagccagactcctcctcgggaaccggaaaagcgggccagcagcctgcaagaaaaagattaaattttggtcagactggagacgcagactccgtacctgacccccagcctctcggacagccaccagcagccccctctggtctgggatctactacaatggctacaggcagtggcgcaccaatggcagacaataacgagggtgccgatggagtgggtaattcctcaggaaattggcattgcgattcccaatggctggacgacagagtcatcgccaccagcacccgaacctgggccctgcccacatacaacaaccacctctacaagcaaatctccagccaatcaggagcctgcaacgacaaccactactttggctacagcaccccctgggggtattttgacttcaacagattccactgccacttttcaccacgtgactggcaaagactcatcaacagcaactggggattccggcccaaaagactcaacttcaagctctttaatattcaagtcaaagaggtcacgcagaatgacggtacgacgacgattgccaataaccttaccagcacggttcaggtgtttactgactcggagtaccagctcccgtacgtcccgggctcggcgcatcaaggatgcctcccgccgtttccagcggacgtcttcatggtcccacagtatggatacctcaccctgaacaacgggagtcaggcggtaggacgctcttccttttactgcctggagtactttccttctcagatgctgcgtactggaaacaactttcagttcagctacacttttgaagacgtgcctttccacagcagctacgctcactgccagagtctggatcggctgatgaatcctctgatcgaccagtacctgtattatctgaacaagacacaaacaaatagtggaactcttcagcagtctcggctactgtttagccaagctggaccaaccaacatgtctcttcaagctaaaaactggctgcctggaccttgctacagacagcagcgtctgtcaaaacaggcaaacgacaataacaactgcaactttccctggactgcagctacaaagtatcatctaaatggccgggactcgttggttaatccaggaccagctatggccagtcacaaggatgacgaagaaaagtttttccccatgcatggaaccctgatatttggtaaacaaggaacaaatgccaacgacgcggatttggaaaatgtcatgattacagatgaagaagaaatcaggcccaccaatcccgtggctacggagcagtacgggactgtgtcaaataatttgcaaaactcaaacactggtccaactacaggaactgtcaatcaccaaggagcgttacctggtatggtgtggcaggatcgagacgtgtacctgcagggacccatttgggccaagattcctcacaccgatggacactttcatccttctccactgatgggaggttttggactcaaacacccgcctcctcagatcatgatcaaaagcactcccgttccagccaatcctcccacaaacttcagttctgccaagtttgcttcttccatcacacagtattccacgggacaggtcagcgtggagatcgagtgggagctgcagaaggagaacagcaaacgctggaatcccgaaattcagtacacttccaactacaacaagtctgttaatgtggactttactgtggacactaatggtgtgtattcagagcctcgccccattggcaccagatacctgactcgtaatctgtaa

SEQ ID NO: 4890 - protein, 736 aa, Adeno-associated virus
MAADGYLPDWLEDTLSEGIRQWWKLKPGPPPPKPAERHKDDSRGLVLPGYKYLGPFNGLDKGEPVNEADAAALEHDKAYDRQLDSGDNPYLKYNHADAEFQERLKEDTSFGGNLGRAVFQAKKRVLEPLRPGLRKPVKTAPGKKRPVEHSPVEPDSSSGTGKAGQQPARKRLNFGQTGDADSVPDPQPLGQPPAAPSGLGSTTMATGSGAPMADNNEGADGVGNSSGNWHCDSQWLDDRVIATSTRTWALPTYNNHLYKQISSQSGACNDNHYFGYSTPWGYFDFNRFHCHFSPRDWQRLINSNWGFRPKRLNFKLFNIQVKEVTQNDGTTTIANNLTSTVQVFTDSEYQLPYVPGSAHQGCLPPFPADVFMVPQYGYLTLNNGSQAVGRSSFYCLEYFPSQMLRTGNNFQFSYTFEDVPFHSSYAHCQSLDRLMNPLIDQYLYYLNKTQTNSGTLQQSRLLFSQAGPTNMSLQAKNWLPGPCYRQQRLSKQANDNNNCNFPWTAATKYHLNGRDSLVNPGPAMASHKDDEEKFFPMHGTLIFGKQGTNANDADLENVMITDEEEIRPTNPVATEQYGTVSNNLQNSNTGPTTGTVNHQGALPGMVWQDRDVYLQGPIWAKIPHTDGHFHPSPLMGGFGLKHPPPQIMIKSTPVPANPPTNFSSAKFASSITQYSTGQVSVEIEWELQKENSKRWNPEIQYTSNYNKSVNVDFTVDTNGVYSEPRPIGTRYLTRNL

SEQ ID NO: 4891 - DNA, 2208 bp, Adeno-associated virus
atggctgccgatggttatcttccagattggctcgaggacactctctctgaaggaataagacagtggtggaagctcaaacctggcccaccaccaccaaagcccgcagagcggcataaggacgacagcaggggtcttgtgcttcctgggtacaagtacctcggacccttcaacggactcgacaagggagagccggtcaacgaggcagacgccgcggccctcgagcacgacaaggcctacgaccggcagctcgacagcggagacaacccgtacctcaagtacaaccacgccgacgcggagtttcaggagcgccttaaagaggatacgtcttttgggggcaacctcggacgagcagtcttccaggcaaaaaagagggttctggaacctctgggcctggttgaggagcctgttaagacggctccgggaaaaaagaggccggtagagcactctcctgcagagccagattcctcctccggaactggaaagtcgggcaaccagcctgcaagaaagagattgaatttcggtcagactggagactcagactccgtacctgacccccagcctctcggacagccaccagcagccccctctggtctgggaactaatacgatggctacaggcagtggcgcaccaatggcagacaataacgagggcgccgacggagtgggtaattcctcgggaaattggcattgcgattccacatggatgggcgacagagtcatcaccaccagcacccgaacctgggccctgcccacctacaacaaccatctgtacaagcaaatatccagccagtctggagccagcaacgacaatcactactttggctacagcaccccctgggggtattttgacttcaacagattccactgccacttttcaccacgtgactggcaaagactcatcaacaacaactggggattccgacccaagagactcaacttcaagctctttaacattcaagtcaaagaggtcacgcagaatgacggtacgacgacgattgccaataaccttaccagcacggttcaggtgtttactgactcggagtaccagctcccgtacgtcctcggctcggcgcatcaaggatgcctcccgccgttcccagcagacgtcttcatggtgccacagtatggatacctcaccctgaacaacgggagtcaggcagtaggacgctcttcattttactgcctagagtactttccttctcagatgctgcgtaccggaaacagctttaccttcagctacacctttgaggacgttcctttccacagcagctacgctcacagccagagtttggaccgtctcatgaatcctctcatcgaccagtacctgtattacttgagcagaacaaacactccaagcggaaccaccacgcagtccaggcttcagttttctcaggccggagcgagtgacattcgggaccagtctaggaactggcttcctggaccctgttaccgtcagcagcgagtatcaaagacatctgcggataacaacaacagtgaatactcgtggactggagctaccaagtaccacctcaatggcagagactctctggtgaatccgggcccggccatggccagccacaaagacgatgaagaaaagttctttcctcagagcggggttcttatctttgggaagcaaggctcagagaaaacaaatgtggatattgaaaaggtcatgattacagacgaagaggaaatcaggaccaccaatcccgtggctacggagcagtatggttctgtatctaccaacctccagagcggcaacacacaagcagctaccgcagatgtcaacacacaaggcgttcttccaggcatggtctggcaagacagagacgtgtacctgcaggggcctatttgggcaaagattccacacacggacggacattttcacccctctcccctcatgggcggatttggacttaaacaccctcctccacagattctcatcaagaacaccccggtacctgcgaatccttcgaccaccttcagtgcggcaaagtttgcttccttcattacacagtactccacggggcaggtcagcgtggagatcgagtgggagctgcagaaggagaacagcaaacgctggaatcccgagatccagtacacttccaactacaacaagtctgttaatgtggactttactgtggacactaatggcgtgtattcagagcctcgccccattggcaccagatacctgactcgtaatctgtaa

SEQ ID NO: 4892 - protein, 735 aa, Adeno-associated virus
MAADGYLPDWLEDTLSEGIRQWWKLKPGPPPPKPAERHKDDSRGLVLPGYKYLGPFNGLDKGEPVNEADAAALEHDKAYDRQLDSGDNPYLKYNHADAEFQERLKEDTSFGGNLGRAVFQAKKRVLEPLGLVEEPVKTAPGKKRPVEHSPAEPDSSSGTGKSGNQPARKRLNFGQTGDSDSVPDPQPLGQPPAAPSGLGTNTMATGSGAPMADNNEGADGVGNSSGNWHCDSTWMGDRVITTSTRTWALPTYNNHLYKQISSQSGASNDNHYFGYSTPWGYFDFNRFHCHFSPRDWQRLINNNWGFRPKRLNFKLFNIQVKEVTQNDGTTTIANNLTSTVQVFTDSEYQLPYVLGSAHQGCLPPFPADVFMVPQYGYLTLNNGSQAVGRSSFYCLEYFPSQMLRTGNSFTFSYTFEDVPFHSSYAHSQSLDRLMNPLIDQYLYYLSRTNTPSGTTTQSRLQFSQAGASDIRDQSRNWLPGPCYRQQRVSKTSADNNNSEYSWTGATKYHLNGRDSLVNPGPAMASHKDDEEKFFPQSGVLIFGKQGSEKTNVDIEKVMITDEEEIRTTNPVATEQYGSVSTNLQSGNTQAATADVNTQGVLPGMVWQDRDVYLQGPIWAKIPHTDGHFHPSPLMGGFGLKHPPPQILIKNTPVPANPSTTFSAAKFASFITQYSTGQVSVEIEWELQKENSKRWNPEIQYTSNYNKSVNVDFTVDTNGVYSEPRPIGTRYLTRNL

SEQ ID NO: 4893 - DNA, 2211 bp, Adeno-associated virus; identical to SEQ ID NO: 4804

SEQ ID NO: 4894 - protein, 736 aa, Adeno-associated virus
MAADGYLPDWLEDTLSEGIRQWWKLKPGPPPPKPAERHKDDSRGLVLPGYKYLGPGNGLDKGEPVNAADAAALEHDKAYDQQLKAGDNPYLKYNHADAEFQERLKEDTSFGGNLGRAVFQAKKRLLEPLGLVEEAAKTAPGKKRPVEQSPQEPDSSAGIGKSGSQPAKKKLNFGQTGDTESVPDPQPIGEPPAAPSGVGSLTMASGGGAPVADNNEGADGVGSSSGNWHCDSQWLGDRVITTSTRTWALPTYNNHLYKQISNSTSGGSSNDNAYFGYSTPWGYFDFNRFHCHFSPRDWQRLINNNWGFRPKRLNFKLFNIQVKEVTDNNGVKTIANNLTSTVQVFTDSDYQLPYVLGSAHEGCLPPFPADVFMIPQYGYLTLNDGGQAVGRSSFYCLEYFPSQMLRTGNNFQFSYEFENVPFHSSYAHSQSLDRLMNPLIDQYLYYLSKTINGSGQNQQTLKFSVAGPSNMAVQGRNYIPGPSYRQQRVSTTVTQNNNSEFAWPGASSWALNGRNSLMNPGPAMASHKEGEDRFFPLSGSLIFGKQGTGRDNVDADKVMITNEEEIKTTNPVATESYGQVATNHQSAQAQAQTGWVQNQGILPGMVWQDRDVYLQGPIWAKIPHTDGNFHPSPLMGGFGMKHPPPQILIKNTPVPADPPTAFNKDKLNSFITQYSTGQVSVEIEWELQKENSKRWNPEIQYTSNYYKSNNVEFAVSTEGVYSEPRPIGTRYLTRNL

SEQ ID NO: 4895 - DNA, 2211 bp, Adeno-associated virus
atggctgccgatggttatcttccagattggctcgaggacactctctctgaaggaataagacagtggtggaagctcaaacctggcccaccaccaccaaagcccgcagagcggcataaggacgacagcaggggtcttgtgcttcctgggtacaagtacctcggacccggcaacggactcgacaagggggagccggtcaacgcagcagacgcggcggccctcgagcacgacaaggcctacgaccagcagctcaaggccggagacaacccgtacctcaagtacaaccacgccgacgccgagttccaggagcggctcaaagaagatacgtcttttgggggcaacctcgggcgagcagtcttccaggccaaaaagaggcttcttgaacctcttggtctggttgaggaagcggctaagacggctcctggaaagaagaggcctgtagagcagtctcctcaggaaccggactcctccgcgggtattggcaaatcgggttcacagcccgctaaaaagaaactcaatttcggtcagactggcgacacagagtcagtccccgaccctcaaccaatcggagaacctcccgcagccccctcaggtgtgggatctcttacaatggcttcaggtggtggcgcaccagtggcagacaataacgaaggtgccgatggagtgggtagttcctcgggaaattggcattgcgattcccaatggctgggggacagagtcatcaccaccagcacccgaacctgggccctgcccacctacaacaatcacctctacaagcaaatctccaacagcacatctggaggatcttcaaatgacaacgcctacttcggctacagcaccccctgggggtattttgacttcaacagattccactgccacttctcaccacgtgactggcagcgactcatcaacaacaactggggattccggcctaagcgactcaacttcaagctcttcaacattcaggtcaaagaggttacggacaacaatggagtcaagaccatcgccaataaccttaccagcacggtccaggtcttcacggactcagactatcagctcccgtacgtgctcgggtcggctcacgagggctgcctcccgccgttcccagcggacgttttcatgattcctcagtacgggtatctgacgcttaatgatgggagccaggccgtgggtcgttcgtccttttactgcctggaatatttcccgtcgcaaatgctaagaacgggtaacaacttccagttcagctacgagtttgagaacgtacctttccatagcagctacgctcacagccaaagcctggaccgactaatgaatccactcatcgaccaatacttgtactatctctcaaagactattaacggttctggacagaatcaacaaacgctaaaattcagcgtggccggacccagcaacatggctgtccagggaagaaactacatacctggacccagctaccgacaacaacgtgtctcaaccactgtgactcaaaacaacaacagcgaatttgcttggcctggagcttcttcttgggctctcaatggacgtaatagcttgatgaatcctggacctgctatggccagccacaaagaaggagaggaccgtttctttcctttgtctggatctttaatttttggcaaacaaggaactggaagagacaacgtggatgcggacaaagtcatgataaccaacgaagaagaaattaaaactactaacccggtagcaacggagtcctatggacaagtggccacaaaccaccagagtgcccaagcacaggcgcagaccggctgggttcaaaaccaaggaatacttccgggtatggtttggcaggacagagatgtgtacctgcaaggacccatttgggccaaaattcctcacacggacggcaactttcacccttctccgctaatgggagggtttggaatgaagcacccgcctcctcagatcctcatcaaaaacacacctgtacctgcggatcctccaacggctttcaataaggacaagctgaactctttcatcacccagtattctactggccaagtcagcgtggagattgagtgggagctgcagaaggaaaacagcaagcgctggaacccggagatccagtacacttccaactattacaagtctaataatgttgaatttgctgttaatactgaaggtgtatatagtgaaccccgccccattggcaccagatacctgactcgtaatctgtaa

SEQ ID NO: 4896 - protein, 736 aa, Adeno-associated virus
MAADGYLPDWLEDTLSEGIRQWWKLKPGPPPPKPAERHKDDSRGLVLPGYKYLGPGNGLDKGEPVNAADAAALEHDKAYDQQLKAGDNPYLKYNHADAEFQERLKEDTSFGGNLGRAVFQAKKRLLEPLGLVEEAAKTAPGKKRPVEQSPQEPDSSAGIGKSGSQPAKKKLNFGQTGDTESVPDPQPIGEPPAAPSGVGSLTMASGGGAPVADNNEGADGVGSSSGNWHCDSQWLGDRVITTSTRTWALPTYNNHLYKQISNSTSGGSSNDNAYFGYSTPWGYFDFNRFHCHFSPRDWQRLINNNWGFRPKRLNFKLFNIQVKEVTDNNGVKTIANNLTSTVQVFTDSDYQLPYVLGSAHEGCLPPFPADVFMIPQYGYLTLNDGSQAVGRSSFYCLEYFPSQMLRTGNNFQFSYEFENVPFHSSYAHSQSLDRLMNPLIDQYLYYLSKTINGSGQNQQTLKFSVAGPSNMAVQGRNYIPGPSYRQQRVSTTVTQNNNSEFAWPGASSWALNGRNSLMNPGPAMASHKEGEDRFFPLSGSLIFGKQGTGRDNVDADKVMITNEEEIKTTNPVATESYGQVATNHQSAQAQAQTGWVQNQGILPGMVWQDRDVYLQGPIWAKIPHTDGNFHPSPLMGGFGMKHPPPQILIKNTPVPADPPTAFNKDKLNSFITQYSTGQVSVEIEWELQKENSKRWNPEIQYTSNYYKSNNVEFAVNTEGVYSEPRPIGTRYLTRNL

SEQ ID NO: 4897 - DNA, 2208 bp, Adeno-associated virus
atggctgccgatggttatcttccagattggctcgaggacactctctctgaaggaataagacagcggtggaagctcaaacctggcccaccaccaccagagcccgcagagcggcataaggacgacagcaggggtcttgtgcttcctgggtacaagtacctcggacccttcaacggactcgacaagggagagccggtcaacgaggcagacgccgcggccctcgagcacgacaaagcctacgaccggcagctcgacagcggagacaacccgtacctcaagtacaaccacgccgacgcggagtttcaggagcgccttaaagaagatacgtcttttgggggcaacctcggacgagcagtcttccaggcgaaaaagagggtacttgaacctctgggcctggttgaggaacctgttaagacggctccgggaaaaaagaggccggtagagcactctcctgtggagccagactcctcctcgggaaccggaaaggcgggccagcagcctgcaagaaaaagattgaattttggtcagactggagacgcagactcagtacctgacccccagcctctcggacagccaccagcagccccctctggtctgggaactaatacgatggctacaggcagtggcgcaccaatggcagacaataacgagggcgccgacggagtgggtaattcctcgggaaattggcattgcgattccacatggatgggcgacagagtcatcaccaccagcacccgaacctgggccctgcccacctacaacaaccacctctacaaacaaatttccagccaatcaggagcctcgaacgacaatcactactttggctacagcaccccttgggggtattttgacttcaacagattccactgccacttttcaccacgtgactggcaaagactcatcaacaacaactggggattccgacccaagagactcaacttcaagctctttaacattcaagtcaaagaggtcacgcagaatgacggtacgacgacgattgccaataaccttaccggcacggttcaggtgtttactgactcggagtaccagctcccgtacgtcctcggctcggcgcatcaaggatgcctcccgccgttcccagcagacgtcttcatggtgccacagtatggatacctcaccctgaacaacgggagtcaggcagtaggacgctcttcattttactgcctggagtactttccttctcagatgctgcgtaccggaaacaactttaccttcagctacacttttgaggacgttcctttccacagcagctacgctcacagccagagtctgggccgtctcatgaatcctctcatcgaccagtacctgtattacttgagcagaacaaacactccaagtggaaccaccacgcagtcaaggcttcagttttctcaggccggagcgagtgacattcgggaccagtctaggaactggcttcctggaccctgttaccgccagcagcgagtatcaaagacatctgcggataacaacaacagtgaatactcgtggactggagctaccaagtaccacctcaatggcagagactctctggtgaatccgggcccggccatggcaagccacaaggacgatgaagaaaagttttttcctcagagcggggttctcatctttgggaagcaaggctcagagaaaacaaatgtggacattgaaaaggtcatgattacagacgaagaggaaatcaggacaaccaatcccgtggctacggagcagtatggttctgtatctaccaacctccagagaggcaacagacaagcagctaccgcagatgtcaacacacaaggcgttcttccaggcatggtctggcaggacagagatgtgtaccttcaggggcccatctgggcaaagattccacacacggacggacattttcacccctctcccctcatgggtggattcggacttaaacaccctcctccacagattctcatcaagaacaccccggtacctgcgaatccttcgaccaccttcagtgcggcaaagtttgcttccttcatcacacagtactccacgggacaggtcagcgtggagatcgagtgggagctgcagaaggaaaacagcaaacgctggaatcccgaaattcagtacacttccaactacaacaagtctgttaatgtggactttactgtggacactaatggcgtgtattcagagcctcgccccattggcaccagatacctgactcgtaatctgtaa

SEQ ID NO: 4898 - protein, 735 aa, Adeno-associated virus
MAADGYLPDWLEDTLSEGIRQRWKLKPGPPPPEPAERHKDDSRGLVLPGYKYLGPFNGLDKGEPVNEADAAALEHDKAYDRQLDSGDNPYLKYNHADAEFQERLKEDTSFGGNLGRAVFQAKKRVLEPLGLVEEPVKTAPGKKRPVEHSPVEPDSSSGTGKAGQQPARKRLNFGQTGDADSVPDPQPLGQPPAAPSGLGTNTMATGSGAPMADNNEGADGVGNSSGNWHCDSTWMGDRVITTSTRTWALPTYNNHLYKQISSQSGASNDNHYFGYSTPWGYFDFNRFHCHFSPRDWQRLINNNWGFRPKRLNFKLFNIQVKEVTQNDGTTTIANNLTGTVQVFTDSEYQLPYVLGSAHQGCLPPFPADVFMVPQYGYLTLNNGSQAVGRSSFYCLEYFPSQMLRTGNNFTFSYTFEDVPFHSSYAHSQSLGRLMNPLIDQYLYYLSRTNTPSGTTTQSRLQFSQAGASDIRDQSRNWLPGPCYRQQRVSKTSADNNNSEYSWTGATKYHLNGRDSLVNPGPAMASHKDDEEKFFPQSGVLIFGKQGSEKTNVDIEKVMITDEEEIRTTNPVATEQYGSVSTNLQRGNRQAATADVNTQGVLPGMVWQDRDVYLQGPIWAKIPHTDGHFHPSPLMGGFGLKHPPPQILIKNTPVPANPSTTFSAAKFASFITQYSTGQVSVEIEWELQKENSKRWNPEIQYTSNYNKSVNVDFTVDTNGVYSEPRPIGTRYLTRNL

SEQ ID NO: 4899 - DNA, 2208 bp, Adeno-associated virus
atggctgccgatggttatcttccagattggctcgaggacactctctctgaaggaataagacagcggtggaagctcaaacctggcccaccaccaccagagcccgcagagcggcataaggacgacagcaggggtcttgtgcttcctgggtacaagtacctcggacccttcaacggactcgacaagggagagccggtcaacgaggcagacgccgcggccctcgagcacgacaaagcctacgaccggcagctcgacagcggagacaacccgtacctcaagtacaaccacgccgacgcggagtttcaggagcgccttaaagaagatacgtcctttgggggcaacctcggacgagcagtcttccaggcgaaaaagagggtacttgaacctctgggcctggttgaggaacctgttaagacggctccgggaaaaaagaggccggtagagcactctcctgtggagccagactcctcctcgggaaccggaaaggcgggccagcagcctgcaagaaaaagattgaattttggtcagactggagacgcagactcagtacctgacccccagcctctcggacagccaccagcagccccctctggtctgggaactaatacgatggctacaggcagtggcgcaccaatggcagacaataacgagggcgccgacggagtgggtaattcctcgggaaattggcattgcgattccacatggatgggcgacagagtcatcaccaccagcacccgaacctgggccctgcccacctacaacaaccacctctacaaacaaatttccagccaatcaggagcctcgaacgacaatcactactttggctacagcaccccttgggggtattttgacttcaacagattccactgccacttttcaccacgtgactggcaaagactcatcaacaacaactggggattccgacccaagagactcaacttcaagctctttaacattcaagtcaaagaggtcacgcagaatgacggtacgacgacgattgccaataaccttaccagcacggttcaggtgtttactgactcggagtaccagctcccgtacgtcctcggctcggcgcatcaaggatgcctcccgccgttcccagcagacgtcttcatggtgccacagtatggatacctcaccctgaacaacgagagtcaggcagtaggacgctcttcattttactgcctggagtactttccttctcagatgctgcgtaccggaaacaactttaccttcagctacacttttgaggacgttcctttccacagcagctacgctcacagccagagtctgggccgtctcatgaatcctctcatcgaccagtacctgtattacttgagcagaacaaacactccaagtggaaccaccacgcagtcaaggcttcagttttctcaggccggagcgagtgacattcgggaccagtctaggaactggcttcctggaccctgttaccgccagcagcgagtatcaaagacatctgcggataacaacaacagtgaatactcgtggactggagctaccaagtaccacctcaatggcagagactctctggtgaatccgggcccggccatggcaagccacaaggacgatgaagaaaagttttttcctcagagcggggttctcatctttgggaagcaaggctcagagaaaacaaatgtggacattgaaaaggtcatgattacagacgaagaggaaatcaggacaaccaatcccgtggctacggagcagtatggttctgtatctaccaacctccagagaggcaacagacaagcagctaccgcagatgtcaacacacaaggcgttcttccaggcatggtctggcaggacagagatgtgtaccttcaggggcccatctgggcaaagattccacacacggacggacattttcacccctctcccctcatgggtggattcggacttaaacaccctcctccacagattctcatcaagaacaccccggtacctgcgaatccttcgaccaccttcagtgcggcaaagtttgcttccttcatcacacagtactccacgggacaggtcagcgtggagatcgagtgggagctgcagaaggaaaacagcaaacgctggaatcccgaaattcagtacacttccaactacaacaagtctgttaatgtggactttactgtggacactaatggcgtgtattcagagcctcgccccattggcaccagatacctgactcgtaatctgtaa

SEQ ID NO: 4900 - protein, 735 aa, Adeno-associated virus
MAADGYLPDWLEDTLSEGIRQRWKLKPGPPPPEPAERHKDDSRGLVLPGYKYLGPFNGLDKGEPVNEADAAALEHDKAYDRQLDSGDNPYLKYNHADAEFQERLKEDTSFGGNLGRAVFQAKKRVLEPLGLVEEPVKTAPGKKRPVEHSPVEPDSSSGTGKAGQQPARKRLNFGQTGDADSVPDPQPLGQPPAAPSGLGTNTMATGSGAPMADNNEGADGVGNSSGNWHCDSTWMGDRVITTSTRTWALPTYNNHLYKQISSQSGASNDNHYFGYSTPWGYFDFNRFHCHFSPRDWQRLINNNWGFRPKRLNFKLFNIQVKEVTQNDGTTTIANNLTSTVQVFTDSEYQLPYVLGSAHQGCLPPFPADVFMVPQYGYLTLNNESQAVGRSSFYCLEYFPSQMLRTGNNFTFSYTFEDVPFHSSYAHSQSLGRLMNPLIDQYLYYLSRTNTPSGTTTQSRLQFSQAGASDIRDQSRNWLPGPCYRQQRVSKTSADNNNSEYSWTGATKYHLNGRDSLVNPGPAMASHKDDEEKFFPQSGVLIFGKQGSEKTNVDIEKVMITDEEEIRTTNPVATEQYGSVSTNLQRGNRQAATADVNTQGVLPGMVWQDRDVYLQGPIWAKIPHTDGHFHPSPLMGGFGLKHPPPQILIKNTPVPANPSTTFSAAKFASFITQYSTGQVSVEIEWELQKENSKRWNPEIQYTSNYNKSVNVDFTVDTNGVYSEPRPIGTRYLTRNL

SEQ ID NO: 4901 - DNA, 2208 bp, Adeno-associated virus
atggctgccgatggttatcttccagattggctcgaggacactctctctgaaggaataagacagcggtggaagctcaaacctggcccaccaccaccagagcccgcagagcggcataaggacgacagcaggggtcttgtgcttcctgggtacaagtacctcggacccttcaacggactcgacaagggagagccggtcaacgaggcagacgccgcggccctcgagcacgacaaagcctacgaccggcagctcgacagcggagacaacccgtacctcaagtacaaccacgccgacgcggagtttcaggagcgccttaaagaagatacgtcttttgggggcaacctcggacgagcagtcttccaggcgaaaaagagggtacttgaacctctgggcctggttgaggaacctgttaagacggctccgggaaaaaagaggccggtagagcactctcctgtggagccagactcctcctcgggaaccggaaaggcgggccagcagcctgcaagaaaaagattgaattttggtcagactggagacgcagactcagtacctgacccccagcctctcggacagccaccagcagccccctctggtctgggaactaatacgatggctacaggcagtggcgcaccaatggcagacaataacgagggcgccgacggagtgggtaattcctcgggaaattggcattgcgattccacatggatgggcgacagagtcatcaccaccagcacccgaacctgggccctgcccacctacaacaaccacctctacaaacaaatttccagccaatcaggagcctcgaacgacaatcactactttggctacagcaccccttgggggtattttgacttcaacagattccactgccacttttcaccacgtgactggcaaagactcatcaacaacaactggggattccgacccaagagactcaacttcaagctctttaacattcaagtcaaagaggtcacgcagaatgacggtacgacgacgattgccaataaccttaccagcacggttcaggtgtttactgactcggagtaccagctcccgtacgtcctcggctcggcgcatcaaggatgcctcccgccgttcccagcagacgtcttcatggtaccacagtatggatacctcaccctgaacaacgggagtcaggcagtaggacgctcttcattttactgcctggagtactttccttctcagatgctgcgtaccggaaacaactttaccttcagctacacttttgaggacgttcctttccacagcagctacgctcacagccagagtctgggccgtctcatgaatcctctcatcgaccagtacctgtattacttgagcagaacaaacactccaagtggaaccaccacgcagtcaaggcttcagttttctcaggccggagcgagtgacattcgggaccagtctaggaactggcttcctggaccctgttaccgccagcagcgagtatcaaagacatctgcggataacaacaacagtgaatactcgtggactggagctaccaagtaccacctcaatggcagagactctctggtgaatccgggcccggccatggcaagccacaaggacgatgaagaaaagttttttcctcagagcggggttctcatctttgggaagcaaggctcagagaaaacaaatgtggacattgaaaaggtcatgattacagacgaagaggaaatcaggacaaccaatcccgtggctacggagcagtatggttctgtatctaccaacctccagagaggcaacagacaagcagctaccgcagatgtcaacacacaaggcgttcttccaggcatggtctggcaggacagagatgtgtaccttcaggggcccatctgggcaaagattccacacacggacggacattttcacccctctcccctcatgggtggattcggacttaaacaccctcctccacagattctcatcaagaacaccccggtacctgcgaatccttcgaccaccttcagtgcggcaaagtttgcttccttcatcacacagtactccacgggacaggtcagcgtggagatcgagtgggagctgcagaaggaaaacagcaaacgctggaatcccgaaattcagtacacttccaactacaacaagtctgttaatgtggactttactgtggacactaatggcgtgtattcagagcctcgccccattggcaccagatacctgactcgtaatctgtaa

SEQ ID NO: 4902 - protein, 735 aa, Adeno-associated virus
MAADGYLPDWLEDTLSEGIRQRWKLKPGPPPPEPAERHKDDSRGLVLPGYKYLGPFNGLDKGEPVNEADAAALEHDKAYDRQLDSGDNPYLKYNHADAEFQERLKEDTSFGGNLGRAVFQAKKRVLEPLGLVEEPVKTAPGKKRPVEHSPVEPDSSSGTGKAGQQPARKRLNFGQTGDADSVPDPQPLGQPPAAPSGLGTNTMATGSGAPMADNNEGADGVGNSSGNWHCDSTWMGDRVITTSTRTWALPTYNNHLYKQISSQSGASNDNHYFGYSTPWGYFDFNRFHCHFSPRDWQRLINNNWGFRPKRLNFKLFNIQVKEVTQNDGTTTIANNLTSTVQVFTDSEYQLPYVLGSAHQGCLPPFPADVFMVPQYGYLTLNNGSQAVGRSSFYCLEYFPSQMLRTGNNFTFSYTFEDVPFHSSYAHSQSLGRLMNPLIDQYLYYLSRTNTPSGTTTQSRLQFSQAGASDIRDQSRNWLPGPCYRQQRVSKTSADNNNSEYSWTGATKYHLNGRDSLVNPGPAMASHKDDEEKFFPQSGVLIFGKQGSEKTNVDIEKVMITDEEEIRTTNPVATEQYGSVSTNLQRGNRQAATADVNTQGVLPGMVWQDRDVYLQGPIWAKIPHTDGHFHPSPLMGGFGLKHPPPQILIKNTPVPANPSTTFSAAKFASFITQYSTGQVSVEIEWELQKENSKRWNPEIQYTSNYNKSVNVDFTVDTNGVYSEPRPIGTRYLTRNL

SEQ ID NO: 4903 - DNA, 2208 bp, Adeno-associated virus
atggctgccgatggttatcttccagattggctcgaggacactctctctgaaggaataagacagcggtggaagctcaaacctggcccaccaccaccagagcccgcagagcggcataaggacgacagcaggggtcttgtgcttcctgggtacaagtacctcggacccttcaacggactcgacaagggagagccggtcaacgaggcagacgccgcggccctcgagcacgacaaagcctacgaccggcagctcgacagcggagacaacccgtacctcaagtacaaccacgccgacgcggagtttcaggagcgccttaaagaagatacgtcttttgggggcaacctcggacgagcagtcttccaggcgaaaaagagggtactcgaacctctgggcctggttgaggaacctgttaagacggctccgggaaaaaagaggccggtagagcactctcctgtggagccagactcctcctcgggaaccggaaaggcgggccagcagcctgcaagaaaaagattgaattttggtcagactggagacgcagactcagtacctgacccccagcctctcggacagccaccagcagccccctctggtctgggaactaatacgatggctacaggcagtggcgcaccaatggcagacaataacgagggcgccgacggagtgggtaattcctcgggaaattggcattgcgattccacatggatgggcgacagagtcatcaccaccagcacccgaacctgggccctgcccacctacaacaaccacctctacaaacaaatttccagccaatcaggagcctcgaacgacaatcactactttggctacagcaccccttgggggtattttgacttcaacagattccactgccacttttcaccacgtgactggcaaagactcatcaacaacaactggggattccgacccaagagactcaacttcaagctctttaacattcaagtcaaagaggtcacgcagaatgacggtacgacgacgattgccaataaccttaccagcacggttcaggtgtttactgactcggagtaccagctcccgtacgtcctcggctcggcgcatcaaggatgcctcccgccgttcccagcagacgtcttcatggtgccacagtatggatacctcaccctgaacaacgggagtcaggcagcaggacgctcttcattttactgcctggagtactttccttctcagatgctgcgtaccggaaacaactttaccttcagctacacttttgaggacgttcctttccacagcagctacgctcacagccagagtctgggccgtctcatgaatcctctcatcgaccagtacctgtattacttgagcagaacaaacactccaagtggaaccaccacgcagtcaaggcttcagttttctcaggccggagcgagtgacattcgggaccagtctaggaactggcttcctggaccctgttaccgccagcagcgagtatcaaagacatctgcggataacaacaacagtgaatactcgtggactggagctaccaagtaccacctcaatggcagagactctctggtgaatccgggcccggccatggcaagccacaaggacgatgaagaaaagttttttcctcagagcggggttctcatctttgggaagcaaggctcagagaaaacaaatgtggacattgaaaaggtcatgattacagacgaagaggaaatcaggacaaccaatcccgtggctacggagcagtatggttctgtatctaccaacctccagagaggcaacagacaagcagctaccgcagatgtcaacacacaaggcgttcttccaggcatggtctggcaggacagagatgtgtaccttcaggggcccatctgggcaaagattccacacacggacggacattttcacccctctcccctcatgggtggattcggacttaaacaccctcctccacagattctcatcaagaacaccccggtacctgcgaatccttcgaccaccttcagtgcggcaaagtttgcttccttcatcacacagtactccacgggacaggtcagcgtggagatcgagtgggagctgcagaaggaaaacagcaaacgctggaatcccgaaattcagtacacttccaactacaacaagtccgttaatgtggactttactgtggacactaatggcgtgtattcagagcctcgccccattggcaccagatacctgactcgtaatctgtaa

SEQ ID NO: 4904 - protein, 735 aa, Adeno-associated virus
MAADGYLPDWLEDTLSEGIRQRWKLKPGPPPPEPAERHKDDSRGLVLPGYKYLGPFNGLDKGEPVNEADAAALEHDKAYDRQLDSGDNPYLKYNHADAEFQERLKEDTSFGGNLGRAVFQAKKRVLEPLGLVEEPVKTAPGKKRPVEHSPVEPDSSSGTGKAGQQPARKRLNFGQTGDADSVPDPQPLGQPPAAPSGLGTNTMATGSGAPMADNNEGADGVGNSSGNWHCDSTWMGDRVITTSTRTWALPTYNNHLYKQISSQSGASNDNHYFGYSTPWGYFDFNRFHCHFSPRDWQRLINNNWGFRPKRLNFKLFNIQVKEVTQNDGTTTIANNLTSTVQVFTDSEYQLPYVLGSAHQGCLPPFPADVFMVPQYGYLTLNNGSQAAGRSSFYCLEYFPSQMLRTGNNFTFSYTFEDVPFHSSYAHSQSLGRLMNPLIDQYLYYLSRTNTPSGTTTQSRLQFSQAGASDIRDQSRNWLPGPCYRQQRVSKTSADNNNSEYSWTGATKYHLNGRDSLVNPGPAMASHKDDEEKFFPQSGVLIFGKQGSEKTNVDIEKVMITDEEEIRTTNPVATEQYGSVSTNLQRGNRQAATADVNTQGVLPGMVWQDRDVYLQGPIWAKIPHTDGHFHPSPLMGGFGLKHPPPQILIKNTPVPANPSTTFSAAKFASFITQYSTGQVSVEIEWELQKENSKRWNPEIQYTSNYNKSVNVDFTVDTNGVYSEPRPIGTRYLTRNL

SEQ ID NO: 4905 - protein, 738 aa, Adeno-associated virus; identical to SEQ ID NO: 4797

SEQ ID NO: 4906 - DNA, 2217 bp, Adeno-associated virus
atggctgctgacggttatcttccagattggctcgaggacaacctctctgagggcattcgcgagtggtgggacctgaaacctggagcccccaagcccaaggccaaccagcagaagcaggacgacggccggggtctggtgcttcctggctacaagtacctcggacccttcaacggactcgacaagggggagcccgtcaacgcggcggacgcagcggccctcgagcacgacaaggcctacgaccagcagctcaaagcgggtgacaatccgtacctgcggtataaccacgccgacgccgagtttcaggagcgtctgcaagaagatacgtcttttgggggcaacctcgggcgagcagtcttccaggccaagaagcgggttctcgaacctctcggtctggttgaggaagctgctaagacggctcctggaaagaagagaccggtagaaccgtcacctcagcgttcccccgactcctccacgggcatcggcaagaaaggccagcagcccgctaaaaagagactgaactttggtcagactggcgactcagagtcagtccccgaccctcaaccaatcggagaaccaccagcaggcccctctggtctgggatctggtacaatggctgcaggcggtggcgctccaatggcagacaataacgaaggcgccgacggagtgggtagttcctcaggaaattggcattgcgattccacatggctgggcgacagagtcatcaccaccagcacccgaacctgggccctgcccacctacaacaaccacctctacaagcaaatatccaatgggacatcgggaggaagcaccaacgacaacacctacttcggctacagcaccccctgggggtattttgacttcaacagattccactgccacttctcaccacgtgactggcagcgactcatcaacaacaactggggattccggccaaaaagactcagcttcaagctcttcaacatccaggtcaaggaggtcacgcagaatgaaggcaccaagaccatcgccaataaccttaccagcacgattcaggtatttacggactcggaataccagctgccgtacgtcctcggctccgcgcaccagggctgcctgcctccgttcccggcggacgtcttcatgattccccagtacggctaccttacactgaacaatggaagtcaagccgtaggccgttcctccttctactgcctggaatattttccatctcaaatgctgcgaactggaaacaattttgaattcagctacaccttcgaggacgtgcctttccacagcagctacgcacacagccagagcttggaccgactgatgaatcctctcatcgaccagtacctgtactacttatccagaactcagtccacaggaggaactcaaggtacccagcaattgttattttctcaagctgggcctgcaaacatgtcggctcaggctaagaactggctacctggaccttgctaccggcagcagcgagtctctacgacactgtcgcaaaacaacaacagcaactttgcttggactggtgccaccaaatatcacctgaacggaagagactctttggtaaatcccggtgtcgccatggcaacccacaaggacgacgaggaacgcttcttcccgtcgagtggagtcctgatgttcggaaaacagggtgctggaagagacaatgtggactacagcagcgttatgctaaccagcgaagaagaaattaaaaccactaaccccgtagccacagaacaatacggtgtggtggctgacaacttgcagcaaaccaatacagggcctattgtgggaaatgtcaacagccaaggagccttacctggcatggtctggcagaaccgagacgtgtacctgcagggtcccatctgggccaagattcctcacacggacggcaacttccacccttcaccgctaatgggaggatttggactgaagcacccacctcctcagatcctgatcaagaacacgccggtacctgcggatcctccaacaacgttcagccaggcgaaattggcttccttcattacgcagtacagcaccggacaggtcagcgtggaaatcgagtgggagctgcagaaggagaacagcaaacgctggaacccagagattcagtacacttcaaactactacaaatctacaaatgtggactttgctgtcaatacagagggaacttattctgagcctcgccccattggtactcgttacctcacccgtaatctgtaa

SEQ ID NO: 4907 - protein, 738 aa, Adeno-associated virus
MAADGYLPDWLEDNLSEGIREWWDLKPGAPKPKANQQKQDDGRGLVLPGYKYLGPFNGLDKGEPVNAADAAALEHDKAYDQQLKAGDNPYLRYNHADAEFQERLQEDTSFGGNLGRAVFQAKKRVLEPLGLVEEAAKTAPGKKRPVEPSPQRSPDSSTGIGKKGQQPAKKRLNFGQTGDSESVPDPQPIGEPPAGPSGLGSGTMAAGGGAPMADNNEGADGVGSSSGNWHCDSTWLGDRVITTSTRTWALPTYNNHLYKQISNGTSGGSTNDNTYFGYSTPWGYFDFNRFHCHFSPRDWQRLINNNWGFRPKRLSFKLFNIQVKEVTQNEGTKTIANNLTSTIQVFTDSEYQLPYVLGSAHQGCLPPFPADVFMIPQYGYLTLNNGSQAVGRSSFYCLEYFPSQMLRTGNNFEFSYTFEDVPFHSSYAHSQSLDRLMNPLIDQYLYYLSRTQSTGGTQGTQQLLFSQAGPANMSAQAKNWLPGPCYRQQRVSTTLSQNNNSNFAWTGATKYHLNGRDSLVNPGVAMATHKDDEERFFPSSGVLMFGKQGAGRDNVDYSSVMLTSEEEIKTTNPVATEQYGVVADNLQQTNTGPIVGNVNSQGALPGMVWQNRDVYLQGPIWAKIPHTDGNCHPSPLMGGFGLKHPPPQILIKNTPVPADPPTTFSQAKLASFITQYSTGQVSVEIEWELQKENSKRWNPEIQYTSNYYKSTNVDFAVNTEGTYSEPRPIGTRYLTRNL

SEQ ID NO: 4908 - protein, 738 aa, Adeno-associated virus
MAADGYLPDWLEDNLSEGIREWWDLKPGAPKPKANQQKQDDGRGLVLPGYKYLGPFNGLDKGEPVNAADAAALEHDKAYDQQLKAGDNPYLRYNHADAEFQERLQEDTSFGGNLGRAVFQAKKRVLEPLGLVEEGAKTAPGKKRPVEPSPQRSPDSSTGIGKKGQQPARKRLNFGRTGDSESVPDPQPIGEPPAAPSSVGSGTMAAGGGAPMADNNEGADGVGSSSGNWHCDSTWLGDRVITTSTRTWALPTYNNHLYKQISNGTSGGSTNDNTYFGYSTPWGYLDFNRFHCHFSPRDWQRLINNNWGFRPKRLSFKLFNIQVKEVTQNEGTKTIANNLASTIQVFTDSEYQPPYVLGSAHQGCLPPFPADVFMIPQYGYLTLNNGSQAVGRSSFYCLEYFPSQMLRTGNNFSFSYTFEDVPFHSSYAHSQSLDRLMNPLIDQYLYYLSRTQSTGGTAGTQQLLFSRAGPSNMSAQARNWLPGPCYRQQRVSTTLSQNNNSNFAWTGATKYHLNGRDSLVNPGVAMATNKDDEDRFFPSSGILMFGKQGAGKDNVDYSNVMLTSEEEIKTTNPVATEQYGVVADNLQQQNTAPTVGAVNSQGALPGMVWQNRDVYLQGPIWAKIPHTDGNFHPSPLMGGFGLKHPPPQILIKNTPVPADPPTAFNQAKLNSFIAQYSTGQVSVEIEWELQKENSKRWNPEIQYTSNYYKSTNADFAVNTEGVYSEPRPIGTRYLTRNL

SEQ ID NO: 4909 - DNA, 2217 bp, Adeno-associated virus
atggctgccgatggttatcttccagattggctcgaggacaacctctctgagggcattcgcgagtggtgggacctgaaacctggagccccgaaacccaaagccaaccagcaaaagcaggacgacggccggggtctggtgcttcctggctacaagtacctcggacccttcaacggactcgacaagggggagcccgtcaacgcggcggacgcagcggccctcgagcacgacaaggcctacgaccagcagctcaaagcgggtgacaatccgtacctgcggtataatcacgccgacgccgagtttcaggagcgtctgcaagaagatacgtcttttgggggcaacctcgggcgagcagtcttccaggccaagaagcgggttctcgaacctctcggtctggttgaggaaggcgctaagacggctcctggaaagaagagaccggtagagccgtcaccacagcgttcccccgactcctccacgggcatcggcaagaaaggccagcagcccgccagaaagagactcaatttcggtcggactggcgactcagagtcagtccccgaccctcaacctatcggagaacctccagcagcgccctctagtgtgggatctggtacaatggctgcaggcggtggcgcaccaatggcagacaataacgaaggtgccgacggagtgggtagttcctcgggaaattggcattgcgattccacatggctgggcgacagagttatcaccaccagcacccgaacctgggccctgcccacctacaacaaccacctctacaagcaaatctccaacgggacctcgggaggcagcaccaacgacaacacctactttggctacagcaccccctgggggtatcttgactttaacagattccactgccacttctcaccacgtgactggcagcgactcatcaacaacaactggggattccggcccaagagactcagcttcaagctcttcaacatccaggtcaaagaggtcacgcagaatgaaggcaccaagaccatcgccaataacctcgccagcaccatccaggtgtttacggactcggaataccagccgccgtacgtcctcggctctgcccaccagggctgcctgcctccgttcccggcggacgtcttcatgattcctcagtacggctacctgactctcaacaacggtagtcaggccgtgggacgttcctccttctactgcctggagtacttcccctctcagatgctgagaacgggcaacaacttttccttcagctacactttcgaggacgtgcctttccacagcagctacgcgcacagccagagtttggacaggctgatgaatcctctcatcgaccagtacctgtactacctgtcaagaacccagtctacgggaggcacagcgggaacccagcagttgctgttttctcgggccgggcctagcaacatgtcggctcaggccagaaactggctgcctggaccctgctacagacagcagcgcgtctccacgacactgtcgcaaaacaacaacagcaactttgcctggactggtgccaccaagtatcatctgaacggcagagactctctggtgaatccgggcgtcgccatggcaaccaacaaggacgacgaggaccgcttcttcccatccagcggcatcctcatgtttggcaagcagggagctggaaaagacaacgtggactatagcaacgtgatgctaaccagcgaggaagaaatcaagaccaccaaccccgtggccacagaacagtatggcgtggtggctgataacctacagcagcaaaacaccgctcctactgtgggggccgtcaacagccagggagccttacctggcatggtctggcagaaccgggacgtgtacctgcagggtcctatttgggccaagattcctcacacagatggcaactttcacccgtctcctttaatgggcggctttggacttaaacatccgcctcctcagatcctcatcaaaaacactcctgttcctgcggatcctccaacagcgttcaaccaggccaagctgaattctttcatcgcgcagtacagcaccggacaagtcagcgtggagatcgagtgggagctgcagaaggagaacagcaagcgctggaacccagagattcagtatacttccaactactacaaatctacaaatgcggactttgctgttaatactgagggtgtttactctgagcctcgccccattggcactcgttacctcacccgtaatctgtaa

SEQ ID NO: 4910 - DNA, 2208 bp, Adeno-associated virus
atggctgccgatggttatcttccagattggctcgaggacactctctctgaaggaataagacagtggtggaagctcaaacctggcccaccaccaccaaagcccgcagagcggcataaggacgacagcaggggtcttgtgcttcctgggtacaagtacctcggacccttcaacggactcgacaagggggagccggtcaacgaggcagacgccgcggccctcgagcacgacaaggcctacgaccggcagctcgacagcggagacaacccgtacctcaagtacaaccacgccgacgcagagtttcaggagcgccttaaagaagatacgtcttttgggggcaacctcggacgagcagtcttccaggcgaaaaagagggttcttgaacctctgggcctggttgaggagcctgttaagacggctccgggaaaaaagaggccggtagagcactctcctgtggagccagactcctcctcgggaaccggaaaagcgggccagcagcctgcaagaaaaagattaaattttggtcagactggagacgcagactccgtacctgacccccagcctctcggacagccaccagcagccccctctggtctgggatctactacaatggctacaggcagtggcgcaccaatggcagacaataacgagggtgccgatggagtgggtaattcctcaggaaattggcattgcgattcccaatggctgggcgacagagtcatcaccaccagcacccgaacctgggccctgcccacatacaacaaccacctctacaagcaaatctccagccaatcaggagccagcaacgacaaccactactttggctacagcaccccctgggggtattttgacttcaacagattccactgccacttttcaccacgtgactggcaaagactcgtcaacaacaaccggggattccggcccaaaagactcaacttcaagctctttaatattcaagtcaaagaggtcacgcagaatgacggtacgacgacgattgccaataaccttaccagcacggttcaggtgtttactgactcggagtaccagctcccgtacgtcctgggctcggcgcatcaaggatgcctcccgccgtttccagcggacgtcttcatggtcccacagtatggatacctcaccctgaacaacgggagtcaggcggtaggacgctcttccttttactgcctggagtactttccttctcagatgctgcgtactggaaacaactttcagttcagctacacttttgaagacgtgcctttccacagcagctacgctcacagccagagtctggatcggctgatgaatcctctgatcgaccagtacctgtattatctgaacaagacacaaacaaatagtggaactcttcagcagtctcggctactgtttagccaagctggaccaaccaacatgtctcttcaagctaaaaactggctgcctggaccttgctacagacagcagcgtctgtcaaaacaggcaaacgacaacaacaacagcaactttccctggactgcagctacaaagtatcatctaaatggccgggactcgttggttaatccaggaccagctatggccagtcacaaggatgacgaagaaaagtttttccccatgcatggaaccctgatatttggtaaacaaggaacaaatgccaacgacgcggatttggaaaatgtcatgattacagatgaagaagaaatcagggccaccaatcccgtggctacggagcagtacgggactgtgtcaaataatttgcaaaactcaaacactggtccaactactggaactgtcaatcaccaaggagcgttacctggtatggtgtggcaggatcgagacgtgtacctgcagggacccatttgggccaagattcctcacaccgatggacactttcatccttctccactgatgggaggttttggactcaaacacccgcctcctcagatcatgatcaaaaacactcccgttccagccaatcctcccacaaacttcagttctgccaagtttgcttctttcatcacacagtattccacgggacaggtcagcgtggagatcgagtgggagctgcagaaggagaacagcaaacgctggaatcccgaaattcagtacacttccaactacaacaagtctgttaatgtggactttactgtggacactaatggtgtgtattcagagcctcgccccattggcaccagatacctgactcgtaatctgtaa

SEQ ID NO: 4911 - protein, 735 aa, Adeno-associated virus
MAADGYLPDWLEDTLSEGIRQWWKLKPGPPPPKPAERHKDDSRGLVLPGYKYLGPFNGLDKGEPVNEADAAALEHDKAYDRQLDSGDNPYLKYNHADAEFQERLKEDTSFGGNLGRAVFQAKKRVLEPLGLVEEPVKTAPGKKRPVEHSPVEPDSSSGTGKAGQQPARKRLNFGQTGDADSVPDPQPLGQPPAAPSGLGSTTMATGSGAPMADNNEGADGVGNSSGNWHCDSQWLGDRVITTSTRTWALPTYNNHLYKQISSQSGASNDNHYFGYSTPWGYFDFNRFHCHFSPRDWQRLVNNNRGFRPKRLNFKLFNIQVKEVTQNDGTTTIANNLTSTVQVFTDSEYQLPYVLGSAHQGCLPPFPADVFMVPQYGYLTLNNGSQAVGRSSFYCLEYFPSQMLRTGNNFQFSYTFEDVPFHSSYAHSQSLDRLMNPLIDQYLYYLNKTQTNSGTLQQSRLLFSQAGPTNMSLQAKNWLPGPCYRQQRLSKQANDNNNSNFPWTAATKYHLNGRDSLVNPGPAMASHKDDEEKFFPMHGTLIFGKQGTNANDADLENVMITDEEEIRATNPVATEQYGTVSNNLQNSNTGPTTGTVNHQGALPGMVWQDRDVYLQGPIWAKIPHTDGHFHPSPLMGGFGLKHPPPQIMIKNTPVPANPPTNFSSAKFASFITQYSTGQVSVEIEWELQKENSKRWNPEIQYTSNYNKSVNVDFTVDTNGVYSEPRPIGTRYLTRNL

SEQ ID NO: 4912 - protein, 738 aa, Adeno-associated virus
MAADGYLPDWLEDNLSEGIREWWDLKPGAPKPKANQQKQDDGRGLVLPGYKYLGPFNGLDKGEPVNAADAAALEHDKAYDQQLKAGDNPYLRYNHADAEFQERLQEDTSFGGNLGRAVFQAKKRVLEPLGLVEEAAKTAPGKKRPVEPSPQRSPDSSTGIGKKGQQPAKKRLSFGQTGDSESVPDPQPIGEPPAGPSGLGSGTMAAGGGAPMADNNEGADGVGSSSGNWHCDSTWLGDRVITTSTRTWALPTYNNHLYKQISNGTSGGSTNDNTYFGYSTPWGYFDFNRFHCHFSPRDWQRLINNNWGFRPKRLSFKLFNIQVKEVTQNEGTKTIANNLTSTIQVFTDSEYQLPYVLGSAHQGCLPPFPADVFMIPQYGYLTLNNGSQAVGRSSFYCLEYFPSQMLRTGNNSEFSYTFEDVPFHSSYAHSQSLDRLMNPLIDQYLYYLSRTQSTGGTQGTQQLLFSQAGPANMSAQAKNWLPGPCYRQQRVSTTLSQNNNSNFAWTGATKYHLNGRDSLVNPGVAMATHKDDEERFFPSSGVLMFGKQGAGRDNVDYSSVMLTSEEEIKTTNPVATEQYGVVADNLQQTNTGPIVGNVNSQGALPGMVWQNRDVYLQGPIWAKIPHTDGNFHPSPLMGGFGLKHPPPQILIKNTPVPADPPTTFSQAKLASFITQYSTGQVSVEIEWELQKENSKRWNPEIQYTSNYYKSTNVDFAVNTEGTYSEPRPIGTRYLTRNL

SEQ ID NO: 4913 - DNA, 2217 bp, Adeno-associated virus
atggctgctgacggttatcttccagattggctcgaggacaacctctctgagggcattcgcgagtggtgggacctgaaacctggagcccccaagcccaaggccaaccagcagaagcaggacgacggccggggtctggtgcttcctggctacaagtacctcggacccttcaacggactcgacaagggggagcccgtcaacgcggcggacgcagcggccctcgagcacgacaaggcctacgaccagcagctcaaagcgggtgacaatccgtacctgcggtataaccacgccgacgccgagtttcaggagcgtctgcaagaagatacgtcttttgggggcaacctcgggcgagcagtcttccaggccaagaagcgggttctcgaacctctcggtctggttgaggaagctgctaagacggctcctggaaagaagagaccggtagaaccgtcacctcagcgttcccccgactcctccacgggcatcggcaagaaaggccagcagcccgctaaaaagagactgagctttggtcagactggcgactcagagtcagtccccgaccctcaaccaatcggagaaccaccagcaggcccctctggtctgggatctggtacaatggctgcaggcggtggcgctccaatggcagacaataacgaaggcgccgacggagtgggtagttcctcaggaaattggcattgcgattccacatggctgggcgacagagtcatcaccaccagcacccgaacctgggccctgcccacctacaacaaccacctctacaagcaaatatccaatgggacatcgggaggaagcaccaacgacaacacctacttcggctacagcaccccctgggggtattttgacttcaacagattccactgccacttctcaccacgtgactggcagcgactcatcaacaacaactggggattccggccaaaaagactcagcttcaagctcttcaacatccaggtcaaggaggtcacgcagaatgaaggcaccaagaccatcgccaataaccttaccagcacgattcaggtatttacggactcggaataccagctgccgtacgtcctcggctccgcgcaccagggctgcctgcctccgttcccggcggacgtcttcatgattccccagtacggctaccttacactgaacaatggaagtcaagccgtaggccgttcctccttctactgcctggaatattttccatctcaaatgctgcgaactggaaacaattctgaattcagctacaccttcgaggacgtgcctttccacagcagctacgcacacagccagagcttggaccgactgatgaatcctctcatcgaccagtacctgtactacttatccagaactcagtccacaggaggaactcaaggtacccagcaattgttattttctcaagctgggcctgcaaacatgtcggctcaggctaagaactggctacctggaccttgctaccggcagcagcgagtctctacgacactgtcgcaaaacaacaacagcaactttgcttggactggtgccaccaaatatcacctgaacggaagagactctttggtaaatcccggtgtcgccatggcaacccacaaggacgacgaggaacgcttcttcccgtcgagtggagtcctgatgtttggaaaacagggtgctggaagagacaatgtggactacagcagcgttatgctaaccagcgaagaagaaattaaaaccactaaccctgtagccacagaacaatacggtgtggtggctgacaacttgcagcaaaccaatacagggcctattgtgggaaatgtcaacagccaaggagccttacctggcatggtctggcagaaccgagacgtgtacctgcagggtcccatctgggccaagattcctcacacggacggcaacttccacccttcaccgctaatgggaggatttggactgaagcacccacctcctcagatcctgatcaagaacacgccggtacctgcggatcctccaacaacgttcagccaggcgaaattggcttccttcattacgcagtacagcaccggacaggtcagcgtggaaatcgagtgggagctgcagaaggagaacagcaaacgctggaacccagagattcagtacacttcaaactactacaaatctacaaatgtggactttgctgtcaatacagagggaacttattctgagcctcgccccattggtactcgttacctcacccgtaatctgtaa

SEQ ID NO: 4914 - protein, 738 aa, Adeno-associated virus
MAADGYLPDWLEDNLSEGIREWWDLKPGAPKPKANQQKQDDGRGLVLPGYKYLGPFNGLDKGEPVNAADAAALEHDKAYDQQLKAGDNPYLRYNHADAEFQERLQEDTSFGGNLGRAVFQAKKRVLEPLGPVEEAAKTAPGKKRPVEPPPQRSPDSSTGIGKKGQQPAKKRLNFGQTGDSESVPDPQPIGEPPAGPSGLGSGTMAAGGGAPMADNNEGADGVGSSSGNWHCDSTWLGDRVITTSTRTWALPTYNNHLYKQISNGTSGGSTNDNTYFGYSTPWGYFDFNRFHCHFSPRDWQRLINNNWGFRPKRLSFKLFNIQVKEVTQNEGTKTVANNLTSTIQVFTDSEYQLPYVLGSAHQGCLPPFPADVFMIPQYGYLTLNNGSQAVGRSSFYCLEYFPSQMLRTGNNFEFSYTFEDVPFHSSYAHSQSLDRLMNPLIDQYLYYLSRTQSTGGTQGTQQLLFSQAGPANMSAQAKNWLPGPCYRQQRVSTTLSQNNNSNFAWTGATKYHLNGRDSLVNPGVAMATHKDDEERFFPSSGVLMFGKQGAGRDNVDYSSVMLTSEEEIKTTNPVATEQYGVVADNLQQTNTGPIVGNVNSQGALPGMVWQNRDVYLQGPIWAKIPHTDGNFHPSPLMGGFGLKHPPPQILIKNTPVPADPPTTFSQAKLASFITQYSTGQVSVEIEWELQKENSKRWNPEIQYTSNYYKSTNVDFAVNTEGTYSEPRPIGTRYLTRNL

SEQ ID NO: 4915 - DNA, 2217 bp, Adeno-associated virus
atggctgctgacggttatcttccagattggctcgaggacaacctctctgagggcattcgcgagtggtgggacctgaaacctggagcccccaagcccaaggccaaccagcagaagcaggacgacggccggggtctggtgcttcctggctacaagtacctcggacccttcaacggactcgacaagggggagcccgtcaacgcggcggacgcagcggccctcgagcacgacaaggcctacgaccagcagctcaaagcgggtgacaatccgtacctgcggtataaccacgccgacgccgagtttcaggagcgtctacaagaagatacgtcttttgggggcaacctcgggcgagcagtcttccaggccaagaagcgggttctcgaacctctcggtccggttgaggaagctgctaagacggctcctggaaagaagagaccggtagaaccgccacctcagcgttcccccgactcctccacgggcatcggcaagaaaggccagcagcccgctaaaaagagactgaactttggtcagactggcgactcagagtcagtccccgaccctcaaccaatcggagaaccaccagcaggcccctctggtctgggatctggtacaatggctgcaggcggtggcgctccaatggcagacaataacgaaggcgccgacggagtgggtagttcctcaggaaattggcattgcgattccacatggctgggcgacagagtcatcaccaccagcacccgaacctgggccctgcccacctacaacaaccacctctacaagcaaatatccaatgggacatcgggaggaagcaccaacgacaacacctacttcggctacagcaccccctgggggtattttgacttcaacagattccactgccacttctcaccacgtgactggcagcgactcatcaacaacaactggggattccggccaaaaagactcagcttcaagctcttcaacatccaggtcaaggaggtcacgcagaatgaaggcaccaagaccgtcgccaataaccttaccagcacgattcaggtatttacggactcggaataccagctgccgtacgtcctcggctccgcgcaccagggctgcctgcctccgttcccggcggacgtcttcatgattccccagtacggctaccttacactgaacaatggaagtcaagccgtaggccgttcctccttctactgcctggaatattttccatctcaaatgctgcgaactggaaacaattttgaattcagctacaccttcgaggacgtgcctttccacagcagctacgcacacagccagagcttggaccgactgatgaatcctctcatcgaccagtacctgtactacttatccagaactcagtccacaggaggaactcaaggtacccagcaattgttattttctcaagctgggcctgcaaacatgtcggctcaggctaagaactggctacctggaccttgctaccggcagcagcgagtctctacgacactgtcgcaaaacaacaacagcaactttgcttggactggtgccaccaaatatcacctgaacggaagagactctttggtaaatcccggtgtcgccatggcaacccacaaggacgacgaggaacgcttcttcccgtcgagtggagtcctgatgtttggaaaacagggtgctggaagagacaatgtggactacagcagcgttatgctaaccagcgaagaagaaattaaaaccactaaccctgtagccacagaacaatacggtgtggtggctgacaacttgcagcaaaccaatacagggcctattgtgggaaatgtcaacagccaaggagccttacctggcatggtctggcagaaccgagacgtgtacctgcagggtcccatctgggccaagattcctcacacggacggcaacttccacccttcaccgctaatgggaggatttggactgaagcacccacctcctcagatcctgatcaagaacacgccggtacctgcggatcctccaacaacgttcagccaggcgaaattggcttccttcattacgcagtacagcaccggacaggtcagcgtggaaatcgagtgggagctgcagaaggagaacagcaaacgttggaacccagagattcagtacacttcaaactactacaaatctacaaatgtggactttgctgtcaatacagagggaacttattctgagcctcgccccattggtactcgttacctcacccgtaatctgtaa

SEQ ID NO: 4916 - protein, 738 aa, Adeno-associated virus
MAADGYLPDWLEDNLSEGIREWWDLKPGAPKPKANQQKQDDGRGLVLPGYKYLGPFNGLDKGEPVNAADAAALEHDKAYDQQLKAGDNPYLRYNHADAEFQERLQEDTSFGGNLGRAVFQAKKRVLEPLGLVEEAAKTAPGKKRPVEPSPQRSPDSSTGIGKKGQQPAKKRLNFGQTGDSESVPDPQPIGEPPAGPSGLGSGTMAAGGGAPMADNNEGADGVGSSSGNWHCDSTWLGDRVITTSTRTWALPTYNNHLYKQISNGTSGGSTNDNTYFGYSTPWGYFDFNRFHCHFSPRDWQRLINNNWGFRPKRLSFKLFNIQVKEVTQNEGTKTIANNLTSTIQVFTDSEYQLPYVLGSAHQGCLPPFPADVFMIPQYGYLTLNNGSQAVGRSSFYCLEYFPSQMLRTGNNFEFSYTFEDVPFHSSYAHSQSLDRLMNPLIDQYLYYLSRTQSTGGTQGTQQLLFSQAGPANMSAQAKNWLPGPCYRQQRVSTTLSQSNNSNFAWTGATKYHLNGRDSLVNPGVAMATHKDDEERFFPSSGVLMFGKQGAGRDNVDYSSVMLTSEEEIKTTNPVATEQYGVVADNLQQTNTGPIVGNVNSQGALPGMVWQNRDVYLQGPIWAKIPHTDGNFHPSPLMGGLGLKHPPPQILIKNTPVPADPPTTFSQAKLASFITQYSTGQVSVEIEWELQKENSKRWNPEIQYTSNYYKSTNVDFAVNTEGTYSEPRPIGTRYLTRNL

SEQ ID NO: 4917 - DNA, 2217 bp, Adeno-associated virus
atggctgctgacggttatcttccagattggctcgaggacaacctctctgagggcattcgcgagtggtgggacctgaaacctggagcccccaagcccaaggccaaccagcagaagcaggacgacggccggggtctggtgcttcctggctacaagtacctcggacccttcaacggactcgacaagggggagcccgtcaacgcggcggacgcagcggccctcgagcacgacaaggcctacgaccagcagctcaaagcgggtgacaatccgtacctgcggtataaccacgccgacgccgagtttcaggagcgtctgcaagaagatacgtcttttgggggcaacctcgggcgagcagtcttccaggccaagaagcgggttctcgaacctctcggtctggttgaggaagcggctaagacggctcctggaaagaagagaccggtagaaccgtcacctcagcgttcccccgactcctccacgggcatcggcaagaaaggccagcagcccgctaaaaagagactgaactttggtcagactggcgactcagagtcagtccccgaccctcaaccaatcggagaaccaccagcaggcccctctggtctgggatctggtacaatggctgcaggcggtggcgctccaatggcagacaataacgaaggcgccgacggagtgggtagttcctcaggaaattggcattgcgattccacatggctgggcgacagagtcatcaccaccagcacccgaacctgggccctgcccacctacaacaaccacctctacaagcaaatatccaatgggacatcgggaggaagcaccaacgacaacacctacttcggctacagcaccccctgggggtattttgacttcaacagattccactgccacttctcaccacgtgactggcagcgactcatcaacaacaactggggattccggccaaaaagactcagcttcaagctcttcaacatccaggtcaaggaggtcacgcagaatgaaggcaccaagaccatcgccaataaccttaccagcacgattcaggtatttacggactcggaataccagctgccgtacgtcctcggctccgcgcaccagggctgcctgcctccgttcccggcggacgtcttcatgattccccagtacggctaccttacactgaacaatggaagtcaagccgtaggccgttcctccttctactgcctggaatattttccatctcaaatgctgcgaactggaaacaattttgaattcagctacaccttcgaggacgtgcctttccacagcagctacgcacacagccagagcttggaccgactgatgaatcctctcatcgaccagtacctgtactacttatccagaactcagtccacaggaggaactcaaggtacccagcaattgttattttctcaagctgggcctgcaaacatgtcggctcaggctaagaactggctacctggaccttgctaccggcagcagcgagtctctacgacactgtcgcaaagcaacaacagcaactttgcttggactggtgccaccaaatatcacctgaacggaagagactctttggtaaatcccggtgtcgccatggcaacccacaaggacgacgaggaacgcttcttcccgtcgagtggagtcctgatgtttggaaaacagggtgctggaagagacaatgtggactacagcagcgttatgctaaccagcgaagaagaaattaaaaccactaaccctgtagccacagaacaatacggtgtggtggctgacaacttgcagcaaaccaatacagggcctattgtgggaaatgtcaacagccaaggagccttacctggcatggtctggcagaaccgagacgtgtacctgcagggtcccatctgggccaagattcctcacacggacggcaacttccacccttcaccgctaatgggaggacttggactgaagcacccacctcctcagatcctgatcaagaacacgccggtacctgcggatcctccaacaacgttcagccaggcgaaattggcttccttcattacgcagtacagcaccggacaggtcagcgtggaaatcgagtgggagctgcagaaggagaacagcaaacgctggaacccagagattcagtacacttcaaactactacaaatctacaaatgtggactttgctgtcaatacagagggaacttattctgagcctcgccccattggtactcgttacctcacccgtaatctgtaa

SEQ ID NO: 4918 - protein, 737 aa, Adeno-associated virus
MAADGYLPDWLEDNLSEGIREWWDLKPGAPKPKANQQKQDDGRGLVLPGYKYLGPFNGLDKGEPVNAADAAALEHDKAYDQQLKAGDNPYPRYNHADAEFQERLQEDTPFGGNLGRAVFQAKKRVLEPLGLVEEAAKTAPGKKRPVEPSPQRSPDSSTGIGKKGQQPAKKRLNFGQTGDSESVPDPQPIGEPPAGPSGLGSGTMAAGGGAPMADNNEGADGVGNASGNWHCDSTWLGDRVITTSTRTWALPTYNNHLYKQISSASTGASNDNHYFGYSTPWGYFDFNRFHCHFSPRDWQRLINNNWGFRPKRLNFKLFNIQVKEVTTNDGVTTIANNLTSTVQVFSDSEYQLPYVLGSAHQGCLPPFPADVFMIPQYGYLTLNNGSQAVGRSSFYCLEYFPSQMLRTGNNFTFSYTFEEVPLHSSYAHSQSLDRLMNPLIVQYLYYLNRTQNQSGSAQNKDLLFSRGSPAGMSVQPKNWLPGPCYRQQRVSKTKTDNNNSNFTWTGASKYNLNGRESIINPGTAMASHKDDEDKFFPMSGVMIFGKESAGASNTALDNVMITDEEEIKATNPVATERFGTVAVNFQSSSTDPATGDVHAMGALPGMVWQDRDVYLQGPIWAKIPHTDGHFHPSPLMGGFGLKNPPPQILIKNTPVPANPPAEFSATKFASFITQYSTGQVSVEIEWELQKENSKRWNPEVQYTSNYAKSASVDFTVDNNGLYTEPRPIGTRYLTRPL

SEQ ID NO: 4919 - protein, 737 aa, Adeno-associated virus
MAADGYLPDWLEDNLSEGIREWWDLKPGAPKPKANQQKQDDGRGLVLPGYKYLGPFNGLDKGEPVNAADAAALEHDKAYDQQLKAGDNPYPRYNHADAEFQERLQEDTSFGGNLGRAVFQAKKRVLEPLGLVEEAAKTAPGKKRPVEPSPQRSPDSSTGIGKKGQQPAKKRLNFGQTGDSESVPDPQPIGEPPAGPSGLGSGTMAAGGGAPMADNNEGADGVGNASGNWHCDSTWLGDRVITTSTRTWALPTYNNHLYKQISSASTGASNDNHYFGYSTPWGYFDFNRFHCHFSPRDWQRLINNNWGFRPKRLNFKLFNIQVKEVTTNDGVTTIANNLTSTVQVFSDSEYQLPYVLGSAHQGCLPPFPADVFMIPQYGYLTLNNGSQAVGRSSFYCLEYFPSQMLRTGNNFTFSYTFEEVPLHSSYAHSQSLDRLMNPLIDQYLYYLNRTQNQSGSAQNKDLLFSRGSPAGMSVQPKNWLPGPCYRQQRVSKTKTDNNNSNFTWTGASKYNLNGRESIINPGTAMASHKDDEDKFFPMSGVMIFGKESAGASNTALDNVMITDEEEIKATNPVATERFGTVAVNFQSSSTDPATGDVHAMGALPGMVWQDRDVYLQGPIWAKIPHTDGHFHPSPLMGGFGLKNPPPQILIKNTPVPANPPAEFSATKFASFITQYSTGQVSVEIEWELQKENSKRWNPEVQYTSNYAKSASVDFTVDNNGLYTEPRPIGTRYLTRPL

SEQ ID NO: 4920 - DNA, 2214 bp, Adeno-associated virus
atggctgctgacggttatcttccagattggctcgaggacaacctctctgagggcattcgcgagtggtgggacctgaaacctggagcccccaagcccaaggccaaccagcagaagcaggacgacggccggggtctggtgcttcctggctacaagtacctcggacccttcaacggactcgacaagggggagcccgtcaacgcggcggacgcagcggccctcgagcacgacaaggcctacgaccagcagctcaaagcgggtgacaatccgtacccgcggtataaccacgccgacgccgagtttcaggagcgtctgcaagaagatacgccttttgggggcaacctcgggcgagcagtcttccaggccaagaagcgggttctcgaacctctcggtctggttgaggaagctgctaagacggctcctggaaagaagagaccggtagaaccgtcacctcagcgttcccccgactcctccacgggcatcggcaagaaaggccagcagcccgctaaaaagagactgaactttggtcagactggcgactcagagtcagtccccgaccctcaaccaatcggagaaccaccagcaggcccctctggtctgggatctggtacaatggctgcaggcggtggcgctccaatggcagacaataacgaaggcgccgacggagtgggtaatgcctcaggaaattggcattgcgattccacatggctgggcgacagagtcatcaccaccagcacccgcacctgggccttgcccacctacaataaccacctctacaagcaaatctccagtgcttcaacgggggccagcaacgacaaccactacttcggctacagcaccccctgggggtattttgatttcaacagattccactgccacttttcaccacgtgactggcagcgactcatcaacaacaattggggattccggcccaagagactcaacttcaaactcttcaacatccaagtcaaggaggtcacgacgaatgatggcgtcacaaccatcgctaataaccttaccagcacggttcaagtcttctcggactcggagtaccagcttccgtacgtcctcggctctgcgcaccagggctgcctccctccgttcccggcggacgtgttcatgattccgcaatacggctacctgacgctcaacaatggcagccaagccgtgggacgttcatccttttactgcctggaatatttcccttctcagatgctgagaacgggcaacaactttaccttcagctacacctttgaggaagtgcctctccacagcagctacgcgcacagccagagcctggaccggctgatgaatcctctcatcgtccaatacctgtattacctgaacagaactcaaaatcagtccggaagtgcccaaaacaaggacttgctgttcagccgtgggtctccagctggcatgtctgttcagcccaaaaactggctacctggaccctgttatcggcagcagcgcgtttctaaaacaaaaacagacaacaacaacagcaattttacctggactggtgcttcaaaatataacctcaatgggcgtgaatccatcatcaaccctggcactgctatggcctcacacaaagacgacgaagacaagttctttcccatgagcggtgtcatgatttttggaaaagagagcgccggagcttcaaacactgcattggacaatgtcatgattacagacgaagaggaaattaaagccactaaccctgtggccaccgaaagatttgggaccgtggcagtcaatttccagagcagcagcacagaccctgcgaccggagatgtgcatgctatgggagcattacctggcatggtgtggcaagatagagacgtgtacctgcagggtcccatttgggccaaaattcctcacacagatggacactttcacccgtctcctcttatgggcggctttggactcaagaacccgcctcctcagatcctcatcaaaaacacgcctgttcctgcgaatcctccggcggagttttcagctacaaagtttgcttcattcatcacccaatactccacaggacaagtgagtgtggaaattgaatgggagctgcagaaagaaaacagcaagcgctggaatcccgaagtgcagtacacatccaattatgcaaaatctgccagcgttgattttactgtggacaacaatggactttatactgagcctcgccccattggcacccgttaccttacccgtcccctgtaa

SEQ ID NO: 4921 - protein, 736 aa, Adeno-associated virus
MAADGYLPDWLEDTLSEGIRQWWKLRPGPPPPKPAERHKDDSRGLVLPGYKYLGPFNGLDKGEPVNEADAAALEHDKAYDRQLDSGDNPYLKYNHADAEFQERLKEDTSFGGNLGRAVFQAKKRVLEPLGLVEEGAETAPGKKRPVEQSPQGPDSSSGIGKTGQQPAKKRLNFGQTGDSESVPDPQPLGEPPATPAAVGPTTMASGGGAPMADNNEGADGVGNASGNWHCDSTWLGDRVITTSTRTWALPTYNNHLYKQISSASTGASNDNHYFGYSTPWGYFDFNRFHCHFSPRDWQRLINNNWGFRPKRLNFKLFNIQVKEVTTNDGVTTIANNLTSTVQVFSDSEYQLPYVLGSAHQGCLPPFPADVFMIPQYGYLTLNNGSQAVGRSSFYCLEYFPSQMLRTGNNFTFSYTFEEVPFHSSYAHSQSLDRLMNPLIDQYLYYPNRTQNQSGSAQNKDLLFSRGSPAGMSVQPKNWLPGPCYRQQRVSKTKTDNNNSNFTWTGASKYNLNGRESIINPGTAMASHKDDEDKFFPMSGVMIFGKESAGASNTALDNVMITDEEEIKATNPVATERFGTVAVNFQSSSTDPATGDVHAMGALPGMVWQGRDVYLQGPIWAKIPHTDGHFHPSPLMGGFGLKNPPPQILIKNTPVPANPPAEFSATKFASFITQYSTGQVSVEIEWELQKENSKRWNPEVQYTSNYAKSANVDFTVDNNGLYTEPRPIGTRYLTRPL

SEQ ID NO: 4922 - DNA, 2211 bp, Adeno-associated virus
atggctgccgatggttatcttccagattggctcgaggacactctctctgaaggaataagacagtggtggaagctcagacctggcccaccaccaccaaagcccgcagagcggcataaggacgacagcaggggtcttgtgcttcctgggtacaagtacctcggacccttcaacggactcgacaagggagagccggtcaacgaggcagacgccgcggccctcgagcacgacaaagcctacgaccggcagctcgacagcggagacaacccgtacctcaagtacaaccacgccgacgcggagtttcaggagcgccttaaagaagatacgtcttttgggggcaacctcgggcgagcagtcttccaggccaagaagcgggttctcgaacctctcggtctggttgaggaaggcgctgagacggctcctggaaagaaacgtccggtagagcagtcgccacaagggccagactcctcctcgggcatcggcaagacaggccagcagcccgctaaaaagagactcaattttggtcagactggcgactcagagtcagtccccgatccacaacctctcggagaacctccagcaacccccgctgctgtgggacctactacaatggcttcaggcggtggcgcaccaatggcagacaataacgaaggcgccgacggagtgggtaatgcctcaggaaattggcattgcgattccacatggctgggcgacagagtcatcaccaccagcacccgcacctgggccttgcccacctacaataaccacctctacaagcaaatctccagtgcttcaacgggggccagcaacgacaaccactacttcggctacagcaccccctgggggtattttgatttcaacagattccactgccacttttcaccacgtgactggcagcgactcatcaacaacaattggggattccggcccaagagactcaacttcaaactcttcaacatccaagtcaaggaggtcacgacgaatgatggcgtcacaaccatcgctaataaccttaccagcacggttcaagtcttctcggactcggagtaccagcttccgtacgtcctcggctctgcgcaccagggctgcctccctccgttcccggcggacgtgttcatgattccgcaatacggctacctgacgctcaacaatggcagccaagccgtgggacgttcatccttttactgcctggaatatttcccttctcagatgctgagaacgggcaacaactttaccttcagctacacctttgaggaagtgcctttccacagcagctacgcgcacagccagagcctggaccggctgatgaatcctctcatcgaccaatacctgtattacccgaacagaactcaaaatcagtccggaagtgcccaaaacaaggacttgctgtttagccgtgggtctccagctggcatgtctgttcagcccaaaaactggctacctggaccctgttatcggcagcagcgcgtttctaaaacaaaaacagacaacaacaacagcaattttacctggactggtgcttcaaaatataacctcaatgggcgtgaatccatcatcaaccctggcactgctatggcctcacacaaagacgacgaagacaagttctttcccatgagcggtgtcatgatttttggaaaagagagcgccggagcttcaaacactgcattggacaatgtcatgattacagacgaagaggaaattaaagccactaaccctgtggccaccgaaagatttgggaccgtggcagtcaatttccagagcagcagcacagaccctgcgaccggagatgtgcatgctatgggagcattacctggcatggtgtggcaaggtagagacgtgtacctgcagggtcccatttgggccaaaattcctcacacagatggacactttcacccgtctcctcttatgggcggctttggactcaagaacccgcctcctcagatcctcatcaaaaacacgcctgttcctgcgaatcctccggcggagttttcagctacaaagtttgcttcattcatcacccaatactccacaggacaagtgagtgtggaaattgaatgggagctgcagaaagaaaacagcaagcgctggaatcccgaagtgcagtacacatccaattatgcaaaatctgccaacgttgattttactgtggacaacaatggactttatactgagcctcgccccattggcacccgttaccttacccgtcccctgtaa

SEQ ID NO: 4923 - protein, 736 aa, Adeno-associated virus
MAADGYLPDWLEDTLSEGIRQWWKLRPGPPPPKPAERHKDDSRGLVLPGYKYLGPFNGLDKGEPVNEADAAALEHDKAYDRQLDSGDNPYLKYNHADAEFQERLKEDTSFGGNLGRAVFQAKKRVLEPLGLVEEGAKTAPGKKRPVEQSPQGPDSSSGIGKTGQQPAKKRLNFGQTGDSESVPDPQPLGEPPATPAAVGPTTMASGGGAPMADNNEGADGVGNASGNWHCDSTWLGDRVITTSTRTWALPTYNNHLYKQISSASTGASNDNHYFGYSTPWGYFDFNRFHCHFSPRDWQRLINNNWGFRPKRLNFKLFNIQVKEVTTNDGVTTIANNLTSTVQVFSDSEYQLPYVLGSAHQGCLPPFPADVFMIPQYGYLTLNNGSQAVGRSSFYCLEYFPSQMLRTGNNFTFSYTFEEVPFHSSYAHSQSLDRLMNPLIDQYLYYPNRTQNQSGSAQNKDLLFSRGSPAGMSVQPKNWLPGPCYRQQRVSKTKTDNNNSNFTWTGASKYNLNGRESIINPGTAMASHKDDEDKFFPMSGVMIFGKESAGASNTALDNVMITDEEEIKATNPVATERFGTVAVNFQSSSTDPATGDVHAMGALPGMVWQGRDVYLQGPIWAKIPHTDGHFHPSPLMGGFGLKNPPPQILIKNTPVPANPPAEFSATKFASFITQYSTGQVSVEIEWELQKENSKRWNPEVQYTSNYAKSANVDFTVDNNGLYTEPRPIGTRYLTRPL

SEQ ID NO: 4924 - protein, 736 aa, Adeno-associated virus
MAADGYLPDWLEDTLSEGIRQWWKLRPGPPPPKPAERHKDDSRGLVLPGYKYLGPFNGLDKGEPVNEADAAALEHDKAYDRQLDSGDNPYLKYNHADAEFQERLKEDTSFGGNLGRAVFQAKKRVLEPLGLVEEGAKTAPGKKRPVEQSPQGPDSSSGIGKTGQQPAKKRLNFGQTGDSESVPDPQPLGEPPATPAAVGPTTMASGGGAPMADNNEGADGVGNASGNWHCDSTWLGDRVITTSTRTWALPTYNNHLYKQISSASTGASNDNHYFGYSTPWGYFDFNRFHCHFSPRDWQRLINNNWGFRPKRLNFKLFNIQVKEVTTNDGVTTIANNLTSTVQVFSDSEYQLPYVLGSAHQGCLPPFPADVFMIPQYGYLTLNNGSQAVGRSSFYCLEYFPSQMLRTGNNFTFSYTFEEVPFHSSYAHSQSLDRLMNPLIDQYLYYLNRTQNQSGSAQNKDLLFSRGSPAGMSVQPKNWLPGPCYRQQRVSKTKTDNNNSNFTWTGASKYNLNGRESIINPGTAMASHKDDEDKFFPMSGVMIFGKESAGASNTALDNVMITDEEEIKATNPVATERFGTVAVNFQSSSTDPATGDVHAMGALPGMVWQGRDVYLQGPIWAKIPHTDGHFHPSPLMGGFGLKNPPPQILIKNTPVPANPPAEFSATKFASFITQYSTGQVSVEIEWELQKENSKRWNPEVQYTSNYAKSANVDFTVDNNGLYTEPRPIGTRYLTRPL

SEQ ID NO: 4925 - protein, 736 aa, Adeno-associated virus
MAADGYLPDWLEDTLSEGIRQWWKLRPGPPPPKPAERHKDDSRGLVLPGYKYLGPFNGLDKGEPVNEADAAALEHDKAYDRQLDSGDNPYLKYNHADAEFQERLKEDTSFGGNLGRAVFQAKKRVLEPLGLVEEGAKTAPGKKRPVEQSPQGPDSSSGIGKTGQQPAKKRLNFGQTGDSESVPDPQPLGEPPATPAAVGPTTMASGGGAPMADNNEGADGVGNASGNWHCDSTWLGDRVITTSTRTWALPTYNNHLYKQISSASTGASNDNHYFGYSTPWGYFDFNRFHCHFSPRDWQRLINNNWGFRPKRLNFKLFNIQVKEVTTNDGVTTIANNLTSTVQVFSDSEYQLPYVLGSAHQGCLPPFPADVFMIPQYGYLTLNNGSQAVGRSSFYCLEYFPSQMLRTGNNFTFSYTFEEVPFHSSYAHSQSLDRLMNPLIDQYLYYLNRTQNQSGSAQNKDLLFSRGSPAGMSVQPKNWLPGPCYRQQRVSKTKTDNNNSNFTWTGASKYNLNGRESIINPGTAMASHKDDEDKFFPMSGVMIFGKESAGASNTALDNVMITDEEEIKATNPVATERFGTVAVNFQSSSTDPATGDVHAMGALPGMVWQDRDVYLQGPIWAKIPHTDGHFHPSPLMGGFGLKNPPPQILIKNTPVPANPPAEFSATKFASFITQYSTGQVSVEIEWELQKENSKRWNPEVQYTSNYAKSANVDFTVDNNGLYTEPRPIGTRYLTRPL

SEQ ID NO: 4926 - DNA, 2208 bp, Adeno-associated virus
atggctgccgatggctatcttccagattggctcgaggacactctctctgaaggaataagacagtggtggaagctcaaacctggcccaccaccaccaaagcccgcagagcggcatagggacgacagcaggggtcttgtgcttcctgggtacaagtacctcggacccttcaacggactcgacaagggagagccggtcaacgaggcagacgccgcggccctcgagcacgacaaagcctacgaccggcagctcgacagcggagacaacccgtacctcaagtacaaccacgccgacgcggagtttcaggagcgccttaaagaagatacgtcttttgggggcaacctcggacgagcagtcttccaggcgaaaaagagggttcttgaacctctgggcctggttgaggaacctgttaagacggctccgggaaaaaagaggccggtagagcactctcctgtggagccagactcctcctcgggaaccggaaaggcgggccagcagcctgcaagaaaaagattgaattttggtcagactggagacgcagactcagtacctgacccccagcctctcggacagccaccagcagccccctctggtctgggaactaatacgatggctacaggcagtggcgcaccaatggcagacaataacgagggcgccgacggagtgggtaattcctcgggaaattggcattgcgattccacatggatgggcgacagagtcatcaccaccagcacccgaacctgggccctgcccacctacaacaaccacctctacaaacaaatttccagccaatcaggagcctcgaacgacaatcactactttggctacagcaccccttgggggtattttgacttcaacagattccactgccacttttcaccacgtgactggcaaagactcatcaacaacaactggggattccgacccaagagactcaacttcaagctctttaacattcaagtcaaagaggtcacgcagaatgacggtacgacgacgattgccaataaccttaccagcacggttcaggtgtttactgactcggggtaccagctcccgtacgtcctcggctcggcgcatcaaggatgcctcccgccgttcccagcagacgtcttcatggtgccacagtatggataccccaccctgaacaacgggagtcaggcagtaggacgctcttcattttactgcctggagtactttccttctcagatgctgcgtaccggaaacaactttaccttcagctacacttttgaggacgttcctttccacagcagctacgctcacagccagagtctggaccgtctcatgaatcctctcatcgaccagtacctgtattacttgagcacaacaaacactccaagtggaaccaccacgcagtcaaggcttcagttttctcaggccggagcgagtgacattcgggaccagtctaggaactggcttcctggaccctgttaccgccagcagcgagtatcaaagacatctgcggataacaacaacagtgaatactcgtggactggagctaccaagtaccacctcaatggcagagactctctggtgaatccgggcccggccgtggcaagccacaaggacgatgaagaaaagttttttcctcagagcggggttctcatctttgggaagcaaggctcagagaaaacaaatgtggacattgaaaaggtcatgattacagacgaagaggaaatcaggacaaccaatcccgtggctacggagcagtatggttctgtatctaccaacctccagagaggcaacagacaagcagctaccgcagatgtcaacacacaaggcgttcttccaggcatggtctggcaggacagagatgtgtaccttcaggggcccatctgggcaaagattccacacacggacggacattttcacccctctcccctcatgggtggattcggacttaaacaccctcctccacagattctcatcaagaacaccccggtacctgcgaatccttcgaccaccttcagtgcggcaaagtttgcttccttcatcacacagtactccacgggacaggtcagcgtggagatcgagtgggagctgcagaaggaaaacagcaaacgctggaatcccgaaattcagtacacttccaactacaacaagtctgttaatgtggactttactgtggacactaatggcgtgtattcagagcctcgccccattggcaccagatacctgactcgtaatctgtaa

SEQ ID NO: 4927 - protein, 735 aa, Adeno-associated virus
MAADGYLPDWLEDTLSEGIRQWWKLKPGPPPPKPAERHRDDSRGLVLPGYKYLGPFNGLDKGEPVNEADAAALEHDKAYDRQLDSGDNPYLKYNHADAEFQERLKEDTSFGGNLGRAVFQAKKRVLEPLGLVEEPVKTAPGKKRPVEHSPVEPDSSSGTGKAGQQPARKRLNFGQTGDADSVPDPQPLGQPPAAPSGLGTNTMATGSGAPMADNNEGADGVGNSSGNWHCDSTWMGDRVITTSTRTWALPTYNNHLYKQISSQSGASNDNHYFGYSTPWGYFDFNRFHCHFSPRDWQRLINNNWGFRPKRLNFKLFNIQVKEVTQNDGTTTIANNLTSTVQVFTDSGYQLPYVLGSAHQGCLPPFPADVFMVPQYGYPTLNNGSQAVGRSSFYCLEYFPSQMLRTGNNFTFSYTFEDVPFHSSYAHSQSLDRLMNPLIDQYLYYLSTTNTPSGTTTQSRLQFSQAGASDIRDQSRNWLPGPCYRQQRVSKTSADNNNSEYSWTGATKYHLNGRDSLVNPGPAVASHKDDEEKFFPQSGVLIFGKQGSEKTNVDIEKVMITDEEEIRTTNPVATEQYGSVSTNLQRGNRQAATADVNTQGVLPGMVWQDRDVYLQGPIWAKIPHTDGHFHPSPLMGGFGLKHPPPQILIKNTPVPANPSTTFSAAKFASFITQYSTGQVSVEIEWELQKENSKRWNPEIQYTSNYNKSVNVDFTVDTNGVYSEPRPIGTRYLTRNL

SEQ ID NO: 4928 - DNA, 2211 bp, Adeno-associated virus
atggctgccgacggttatcttccagattggctcgaggacactctctctgaaggaataagacagtggtggaagctcaaacctggcccaccaccaccaaagcccgcagagcggcataaggacgacagcaggggtcttgtgcttcctgggtacaagtacctcggacccttcaacggactcgacaagggagagccggtcaacgaggcagacgccgcggccctcgagcacgacaaagcctacgaccggcagctcgacagcggagacaacccgtacctcaagtacaaccacgccgacgcggagtttcaggagcgccttaaagaagatacgtcttttgggggcaacctcgggcgggcagtcttccaggccaagaagcgggttctcgaacctctcggtctggttgaggaaggcgctaagacggctcctggaaagaaacgtccggtagagcagtcgccacaagagccagactccccctcgggcatcggcaagacaggccagcagcccgctaaaaagagactcaattttggtcagactggcgactcagagtcagtccccgatccacaacctctcggagaacctccagcaacccccgctgctgtgggacctactacaatggcttcaggcggtggcgcaccaatggcagacaataacgaaggcgccgacggagtgggtaatgcctcaggaaattggcactgcgattccacatggctgggcgacagagtcatcaccaccagcacccgcacctgggccttgcccacctacaataaccacctctacaagcaaatctccagtgcttcaacgggggccagcaacgacaaccactacttcggctacagcaccccctgggggtattttgatttcaacagattccactgccacttttcaccacgtgactggcagcgactcatcaacaacaattggggattccggcccaagagactcaacttcaaactcttcaacatccaagtcaaggaggtcacgacgaatgatggcgtcacaaccatcgctaataaccttaccagcacggttcaagtcttctcggactcggagtaccagcttccgtacgtcctcggctctgcgcaccagggccgcctccctccgttcccggcggacgtgttcatgattccgcaatacggctacctgacgctcaacaatggcagccaagccgtgggacgttcatcctcttactgcctggaatatttcccttctcagatgctgagaacgggcaacaactttaccttcagctacacctttgaggaagtgcctctccacagcagctgcgcgcacagccagagcctggaccggctgatgaatcctctcatcgaccaatacctgtattacctgaacagaactcaaaatcagtccggaagtgcccaaaacagggacttgctgttcagccgtgggtctccagctggcatgtctgttcagcccaaaaactggctacctggaccctgttatcggcagcagcgcgtttctaaaacaaaaacagacaacaacaacagcaattttacctggactggtgcttcaaaatataacctcaatgggcgtgaatccatcatcaaccctggcactgctatggcctcacacaaagacgacgaagacaagttctttcccatgagcggtgtcatgatttttggaaaagagagcgccggagcttcaaacactgcattggacaatgtcatgattacagacgaagaggaaattaaagccactaaccctgtggccaccgaaagatttgggaccgtggcagtcaatttccagagcagcagcacagaccctgcgaccggagatgtgcatgctatgggagcattacctggcatggtgtggcaagatagagacgtgtacctgcagggtcccatttgggccaaaattcctcacacagatggacactttcacccgtctcctcttatgggcggctttggactcaagaacccgcctcctcagatcctcatcaaaaacacgcctgttcctgcgaatcctccggcggagttttcagctacaaagtttgcttcattcatcacccaatactccgcaggacaagtgagtgtggaaattgaatgggagctgcagaaagaaaacagcaagcgctggaatcccgaagtgcagtacacatccaattatgcaaaatctgccaacgttgattttactgtggacaacaatggactttatactgagcctcgccccattggcacccgttaccttacccgtcccctgtaa

SEQ ID NO: 4929 - protein, 736 aa, Adeno-associated virus
MAADGYLPDWLEDTLSEGIRQWWKLKPGPPPPKPAERHKDDSRGLVLPGYKYLGPFNGLDKGEPVNEADAAALEHDKAYDRQLDSGDNPYLKYNHADAEFQERLKEDTSFGGNLGRAVFQAKKRVLEPLGLVEEGAKTAPGKKRPVEQSPQEPDSPSGIGKTGQQPAKKRLNFGQTGDSESVPDPQPLGEPPATPAAVGPTTMASGGGAPMADNNEGADGVGNASGNWHCDSTWLGDRVITTSTRTWALPTYNNHLYKQISSASTGASNDNHYFGYSTPWGYFDFNRFHCHFSPRDWQRLINNNWGFRPKRLNFKLFNIQVKEVTTNDGVTTIANNLTSTVQVFSDSEYQLPYVLGSAHQGRLPPFPADVFMIPQYGYLTLNNGSQAVGRSSSYCLEYFPSQMLRTGNNFTFSYTFEEVPLHSSCAHSQSLDRLMNPLIDQYLYYLNRTQNQSGSAQNRDLLFSRGSPAGMSVQPKNWLPGPCYRQQRVSKTKTDNNNSNFTWTGASKYNLNGRESIINPGTAMASHKDDEDKFFPMSGVMIFGKESAGASNTALDNVMITDEEEIKATNPVATERFGTVAVNFQSSSTDPATGDVHAMGALPGMVWQDRDVYLQGPIWAKIPHTDGHFHPSPLMGGFGLKNPPPQILIKNTPVPANPPAEFSATKFASFITQYSAGQVSVEIEWELQKENSKRWNPEVQYTSNYAKSANVDFTVDNNGLYTEPRPIGTRYLTRPL

SEQ ID NO: 4930 - protein, 736 aa, Adeno-associated virus
MAADGYLPDWLEDTLSEGIRQWWKLKPGPPPPKPAERHKDDSRGLVLPGYKYLGPFNGLDKGEPVNEADAAALEHDKAYDRQLDSGDNPYLKYNHADAEFQERLKEDTSFGGNLGRAVFQAKKRVLEPLGLVEEGAKTAPGKKRPVEQSPQEPDSSSGIGKTGQQPAKKRLNFGQTGDSESVPDPQPLGEPPATPAAVGPTTMASGGGAPMADNNEGADGVGNASGNWHCDSTWLGDRVITTSTRTWALPTYNNHLYKQISSASTGASNDNHYFGYSTPWGYFDFNRFHCHFSPRDWQRLINNNWGFRPKRLNFKLFNIQVKEVTTNDGVTTIANNLTSTVQVFSDSEYQLPYVLGSAHQGCLPPFPADVFMIPQYGYLTLNNGSQAVGRSSFYCLEYFPSQMLRTGNNFTFSYTFEEVPLHSSCAHSQSLDRLMNPLIDQYLYYLNRTQNQSGSAQNRDLLFSRGSPAGMSVQPKNWLPGPCYRQQRVSKTKTDNNNSNFTWTGASKYNLNGRESIINPGTAMASHKDDEDKFFPMSGVMIFGKESAGASNTALDNVMITDEEEIKATNPVATERFGTVAVNFQSSSTDPATGDVHAMGALPGMVWQDRDVYLQGPIWAKIPHTDGHFHPSPLMGGFGLKNPPPQILIKNTPVPANPPAEFSATKFASFITQYSTGQVSVEIEWELQKENSKRWNPEVQYTSNYAKSANVDFTVDNNGLYTEPRPIGTRYLTRPL

SEQ ID NO: 4931 - DNA, 2208 bp, Adeno-associated virus
atggctgccgatggctatcttccagattggctcgaggacactctctctgaaggaataagacagtggtggaagctcaaacctggcccaccaccaccaaagcccgcagagcggcatagggacgacagcaggggtcttgtgcttcctgggtacaagtacctcggacccttcaacggactcgacaagggagagccggtcaacgaggcagacgccgcggccctcgagcacgacaaagcctacgaccggcagctcgacagcggagacaacccgtacctcaagtacaaccacgccgacgcggagtttcaggagcgccttaaagaagatacgtcttttgggggcaacctcggacgagcagtcttccaggcgaaaaagagggttcttgaacctctgggcctggttggggaacctgttaagacggctccgggaaaaaagaggccggtagagcactctcctgtggagccagactcctcctcgggaaccggaaaggcgggccagcagcctgcaagaaaaagattgaattttggtcagactggagacgcagactcagtacctgacccccagcctctcggacagccaccagcagccccctctggtctgggaactaatacgatggctacaggcagtggcgcaccaatggcagacaataacgagggcgccgacggagtgggtaattcctcgggaaattggcattgcgattccacatggatgggcgacagagtcatcaccaccagcacccgaacctgggccctgcccacctacaacaaccacctctacaaacaaatttccagccaatcaggagcctcgaacgacagtcactactttggctacagcaccccttgggggtattttgacttcaacagattccactgccacttttcaccacgtgactggcaaagactcatcaacaacaactggggattccgacccaagagactcaacttcaagctctttaacattcaagtcaaagaggtcacgcagaatgacggtacgacgacgattgccaataaccttaccagcacggttcaggtgtttactgactcggagtaccagctcccgtacgtcctcggctcggcgcatcaaggatgcctcccgccgttcccagcagacgtcttcatggtgccacagtatggatacctcaccctgaacaacgggagtcaggcagtaggacgctcttcattttactgcctggagtactttccttctcagatgctgcgtaccggaaacaactttaccttcagctacacttttgaggacgttcctttccacagcagctacgctcacagccagagtctggaccgtctcatgaatcctctcatcgaccagtacctgtattacttgagcacaacaaacactccaagtggaaccaccacgcagtcaaggctccagttttctcaggccggagcgagtgacattcgggaccagtctaggaactggcttcctggaccctgttaccgccagcagcgagtatcaaagacatctgcggataacaacaacagtgaatactcgtggactggagctaccaagtaccacctcaatggcagagactctctggtgaatccgggcccggccatggcaagccacaaggacaatgaagaaaagttttttcctcagagcggggttctcatctttgggaagcaaggctcagagaaaacaaatgtggacattgaaaaggtcatgattacagacgaagaggaaatcaggacaaccaatcccgtggctacggagcagtatggttctgtatctaccaacctccagagaggcaacagacaagcagctaccgcagatgtcaacacacaaggcgttcttccaggcatggtctggcaggacagagatgtgtaccttcaggggcccatctgggcaaagattccacacacggacggacattttcacccctctcccctcatgggtggattcggacttaaacaccctcctccacagattctcatcaagaacaccccggtacctgcgaatccttcgaccaccttcagtgcggcaaagtttgcttccttcatcacacagtactccacgggacaggtcagcgtggagatcgagtgggagctgcagaaggaaaacagcaaacgctggaatcccgaaattcagtacacttccaactacaacaagtctgttaatgtggactttactgtggacactaatggcgtgtattcagagcctcgccccattggcaccagatacctgactcgtaatctgtaa

SEQ ID NO: 4932 - protein, 735 aa, Adeno-associated virus
MAADGYLPDWLEDTLSEGIRQWWKLKPGPPPPKPAERHRDDSRGLVLPGYKYLGPFNGLDKGEPVNEADAAALEHDKAYDRQLDSGDNPYLKYNHADAEFQERLKEDTSFGGNLGRAVFQAKKRVLEPLGLVGEPVKTAPGKKRPVEHSPVEPDSSSGTGKAGQQPARKRLNFGQTGDADSVPDPQPLGQPPAAPSGLGTNTMATGSGAPMADNNEGADGVGNSSGNWHCDSTWMGDRVITTSTRTWALPTYNNHLYKQISSQSGASNDSHYFGYSTPWGYFDFNRFHCHFSPRDWQRLINNNWGFRPKRLNFKLFNIQVKEVTQNDGTTTIANNLTSTVQVFTDSEYQLPYVLGSAHQGCLPPFPADVFMVPQYGYLTLNNGSQAVGRSSFYCLEYFPSQMLRTGNNFTFSYTFEDVPFHSSYAHSQSLDRLMNPLIDQYLYYLSTTNTPSGTTTQSRLQFSQAGASDIRDQSRNWLPGPCYRQQRVSKTSADNNNSEYSWTGATKYHLNGRDSLVNPGPAMASHKDNEEKFFPQSGVLIFGKQGSEKTNVDIEKVMITDEEEIRTTNPVATEQYGSVSTNLQRGNRQAATADVNTQGVLPGMVWQDRDVYLQGPIWAKIPHTDGHFHPSPLMGGFGLKHPPPQILIKNTPVPANPSTTFSAAKFASFITQYSTGQVSVEIEWELQKENSKRWNPEIQYTSNYNKSVNVDFTVDTNGVYSEPRPIGTRYLTRNL

SEQ ID NO: 4933 - protein, 737 aa, Adeno-associated virus
RMAADGYLPDWLEDNLSEGIREWWDLKPGAPKPKANQQKQDDGRGLVLPGYKYLGPFNGLDKGEPVNAADAAALEHDKAYDQQLKAGDNPYLRYNHADAEFQERLQEDTSFGGNLGRAVFQAKKRVLEPLGLVEEGAKTAPGKKRPVEQSPQEPDSSSGIGKTGQQPAKKRLNFGQTGDSESVPDPQPLGEPPATPAAVGPTTMASGGGAPMADNNEGADGVGNASGNWHCDSTWLGDRVITTSTRTWALPTYNNHLYKQISSTSTGASNDNHYFGYGTPWGYFDFNRFHCHFSPRDWQRLINNNWGFRPKRLNFKLFNIQVEEVTTNDGVTTIANNLTSTVQVFSDSEYQLPYVLGSAHQGCLPPFPADVFMIPQYGYLTLNNGSQAVGRSSFYCLEYFPSQMLRTGNNFTFSYTFEEVPFHSSYAHSQSLDRLMNPLIDQYLYYLNRTQNQSGSAQNKDLLFSRGSPAGMSVQPKNWLPGPCYRQQRVSKTKTDNNNSNFTWTGASKYNLNGRESIINPGTAVASHKDDEDKFFPMSGVMIFGKESAGASSTALDNVMITDEEEIKATNPVATERFGTVAVNFQSSSTDPATGDVHAMGALPGMVWQDRDVYLQGPIWAKIPHTDGHFHPSPLMGGFGLKNPPPQILIKNTPVPANPPAEFSATKFASFITQYSTGQVSVEIEWELQKENSKRWNPEVQYTSNYAKSANVDFTVDNNGLYTEPRPIGTRYLTRPL

SEQ ID NO: 4934 - protein, 736 aa, Adeno-associated virus
MAADGYLPDWLEDNLSEGIREWWDLKPGAPKPKANQQKQDDGRGLVLPGYKYLGPFNGLDKGEPVNAADAAALEHDKAYDQQLKAGDNPYLRYNHADAEFQERLQEDTSFGGNLGRAVFQAKKRVLEPLGLVEEGAKTAPGKKRPVEQSPQEPDSSSGIGKTGQQPAKKRLNFGQTGDSESVPDPQPLGEPPATPAAVGPTTMASGGGAPMADNNEGADGVGNASGNWHCDSTWLGDRVITTSTRTWALPTYNNHLYKQISSTSTGASNDNHYFGYGTPWGYFDFNRFHCHFSPRDWQRLINNNWGFRPKRLNFKLFNIQVEEVTTNDGVTTIANNLTSTVQVFSDSEYQLPYVLGSAHQGCLPPFPADVFMIPQYGYLTLNNGSQAVGRSSFYCLEYFPSQMLRTGNNFTFSYTFEEVPFHSSYAHSQSLDRLMNPLIDQYLYYLNRTQNQSGSAQNKDLLFSRGSPAGMSVQPKNWLPGPCYRQQRVSKTKTDNNNSNFTWTGASKYNLNGRESIINPGTAVASHKDDEDKFFPMSGVMIFGKESAGASSTALDNVMITDEEEIKATNPVATERFGTVAVNFQSSSTDPATGDVHAMGALPGMVWQDRDVYLQGPIWAKIPHTDGHFHPSPLMGGFGLKNPPPQILIKNTPVPANPPAEFSATKFASFITQYSTGQVSVEIEWELQKENSKRWNPEVQYTSNYAKSANVDFTVDNNGLYTEPRPIGTRYLTRPL

SEQ ID NO: 4935 - DNA, 2211 bp, Adeno-associated virus
atggctgccgatggttatcttccagattggctcgaggacaacctctctgagggcattcgcgagtggtgggacttgaaacctggagccccgaagcccaaagccaaccagcaaaagcaggacgacggccggggtctggtgcttcctggctacaagtacctcggacccttcaacggactcgacaagggggagcccgtcaacgcggcggacgcagcggccctcgagcacgacaaggcctacgaccagcagctcaaagcgggtgacaatccgtacctgcggtataaccacgccgacgccgagtttcaggagcgtctgcaagaagatacgtcttttgggggcaacctcgggcgagcagtcttccaggccaagaagcgggttctcgaacctctcggtctggttgaggaaggcgctaagacggctcctggaaagaaacgtccggtagagcagtcgccacaagagccagactcctcctcgggcatcggcaagacaggccagcagcccgctaaaaagagactcaattttggccagactggcgactcagagtcagtccccgatccacaacctctcggagaacctccagcaacccccgctgctgtgggacctactacaatggcttcaggcggtggcgcaccaatggcagacaataacgaaggcgccgacggagtgggtaatgcctcaggaaattggcattgcgattccacatggctgggcgacagagtcatcaccaccagcacccgcacctgggccttgcccacctacaataaccacctctacaagcaaatctccagtacttcaacgggggccagcaacgacaaccactacttcggctacggcaccccctgggggtattttgatttcaacagattccactgccacttttcaccacgtgactggcagcgactcatcaacaacaattggggattccggcccaagagactcaacttcaaactcttcaacatccaagtcgaggaggtcacgacgaatgatggcgtcacaaccatcgctaataaccttaccagcacggttcaagtcttctcggactcggagtaccagcttccgtacgtcctcggctctgcgcaccagggctgcctccctccgttcccggcggacgtgttcatgattccgcaatacggctacctgacgctcaacaatggcagccaagccgtgggacgttcatccttttactgcctggaatatttcccttctcagatgctgagaacgggcaacaactttaccttcagctacacctttgaggaagtgcctttccacagcagctacgcgcacagccagagcctggaccggctgatgaatcctctcatcgaccaatacctgtattacctgaacagaacacaaaatcagtccggaagtgcccaaaacaaggacttgctgtttagccgtgggtctccagctggcatgtctgttcagcccaaaaactggctacctggaccctgttatcggcagcagcgcgtttctaaaacaaaaacagacaacaacaacagcaattttacctggactggtgcttcaaaatataacctcaatgggcgtgaatccatcatcaaccctggcaccgctgtggcctcacacaaagacgacgaagacaagttctttcccatgagcggtgtcatgatttttggaaaagagagcgccggagcttcaagcactgcattggacaatgtcatgattacagacgaagaggaaattaaagccactaaccctgtggccaccgaaagatttgggaccgtggcagtcaatttccagagcagcagcacagaccctgcgaccggagatgtgcatgctatgggagcattacctggcatggtgtggcaagatagagacgtgtacctgcagggtcccatttgggccaaaattcctcacacagatggacactttcacccgtctcctcttatgggcggctttggactcaagaacccgcctcctcagatcctcatcaaaaacacgcctgttcctgcgaatcctccggcggagttttcagctacaaagtttgcttcattcatcacccaatactccacaggacaagtgagtgtggaaattgaatgggagctgcagaaagaaaacagcaagcgctggaatcccgaagtgcagtacacatccaattatgcaaaatctgccaacgttgattttactgtggacaacaatggactttatactgagcctcgccccattggcacccgttaccttacccgtcccctgtaa

SEQ ID NO: 4936 - protein, 737 aa, Adeno-associated virus
RMAADGYLPDWLEDNLSEGIREWWDLKPGAPKPKANQQKQDDGRGLVLPGYKYLGPFNGLDKGEPVNAADAAALEHDKAYDQQLKAGDNPYLRYNHADAEFQERLQEDTSFGGNLGRAVFQAKKRVLEPLGLVEEGAKTAPGKKRPVEQSPQEPDSSSGIGKTGQQPAKKRLNFGQTGDSESVPDPQPLGEPPATPAAVGPTTMASGGGAPMADNNEGADGVGNASGNWHCDSTWLGDRVITTSTRTWALPTYNNHLYKQISSTSTGASNDNHYFGYSTPWGYFDFNRFHCHFSPRDWQRLINNNWGFRPKRLNFKLFNIQVEEVTTNDGVTTIANNLTSTVQVFSDSEYQLPYVLGSAHQGCLPPFPADVFMIPQYGYLTLNNGSQAVGRSSFYCLEYFPSQMLRTGNNFTFSYTFEEVPFHSSYAHSQSLDRLMNPLIDQYLYYLNRTQNQSGSAQNKDLLFSRGSPAGMSVQPKNWLPGPCYRQQRVSKTKTDNNNSNFTWTGASKYNLNGRESIINPGTAVASHKDDEDKFFPMSGVMIFGKESAGASSTALDNVMITDEEEIKATNPVATERFGTVAVNFQSSSTDPATGDVHAMGALPGMVWQDRDVYLQGPIWAKIPHTDGHFHPSPLMGGFGLKNPPPQILIKNTPVPANPPAEFSATKFASFITQYSTGQVSVEIEWELQKENSKRWNPEVQYTSNYAKSANVDFTVDNNGLYTEPRPIGTRYLTRPL

SEQ ID NO: 4937 - protein, 737 aa, Adeno-associated virus
RMAADGYLPDWLEDNLSEGIREWWDLKPGAPKPKANQQKQDDGRGLVLPGYKYLGPFNGLDKGEPVNAADAAALEHDKAYDQQLKAGDNPYLRYNHADAEFQERLQEDTSFGGNLGRAVFQAKKRVLEPLGLVEEGAKTAPGKKRPVEQSPQEPDSSSGIGKTGQQPAKKRLNFGQTGDSESVPDPQPLGEPPATPAAVGPTTMASGGGAPMADNNEGADGVGNASGNWHCDSTWLGDRVITTSTRTWALPTYNNHLYKQISSTSTGASNDNHYFGYSTPWGYFDFNRFHCHFSPRDWQRLINNNWGFRPKRLNFKLFNIQVKEVTTNDGVTTIANNLTSTVQVFSDSEYQLPYVLGSAHQGCLPPFPADVFMIPQYGYLTLNNGSQAVGRSSFYCLEYFPSQMLRTGNNFTFSYTFEEVPFHSSYAHSQSLDRLMNPLIDQYLYYLNRTQNQSGSAQNKDLLFSRGSPAGMSVQPKNWLPGPCYRQQRVSKTKTDNNNSNFTWTGASKYNLNGRESIINPGTAVASHKDDEDKFFPMSGVMIFGKESAGASSTALDNVMITDEEEIKATNPVATERFGTVAVNFQSSSTDPATGDVHAMGALPGMVWQDRDVYLQGPIWAKIPHTDGHFHPSPLMGGFGLKNPPPQILIKNTPVPANPPAEFSATKFASFITQYSTGQVSVEIEWELQKENSKRWNPEVQYTSNYAKSANVDFTVDNNGLYTEPRPIGTRYLTRPL

SEQ ID NO: 4938 - protein, 737 aa, Adeno-associated virus
RMAADGYLPDWLEDNLSEGIREWWDLKPGAPKPKANQQKQDDGRGLVLPGYKYLGPFNGLDKGEPVNAADAAALEHDKAYDQQLKAGDNPYLRYNHADAEFQERLQEDTSFGGNLGRAVFQAKKRVLEPLGLVEEGAKTAPGKKRPVEQSPQEPDSSSGIGKTGQQPAKKRLNFGQTGDSESVPDPQPLGEPPATPAAVGPTTMASGGGAPMADNNEGADGVGNASGNWHCDSTWLGDRVITTSTRTWALPTYNNHLYKQISSTSTGASNDNHYFGYSTPWGYFDFNRFHCHFSPRDWQRLINNNWGFRPKRLNFKLFNIQVKEVTTNDGVTTIANNLTSTVQVFSDSEYQLPYVLGSAHQGCLPPFPADVFMIPQYGYLTLNNGSQAVGRSSFYCLEYFPSQMLRTGNNFTFSYTFEEVPFHSSYAHSQSLDRLMNPLIDQYLYYLNRTQNQSGSAQNKDLLFSRGSPAGMSVQPKNWLPGPCYRQQRVSKTKTDNNNSNFTWTGASKYNLNGRESIINPGTAVASHKDDEDKFFPMSGVMIFGKESAGANSTALDNVMITDEEEIKATNPVATERFGTVAVNFQSSSTDPATGDVHAMGALPGMVWQDRDVYLQGPIWAKIPHTDGHFHPSPLMGGFGLKNPPPQILIKNTPVPANPPAEFSATKFASFITQYSTGQVSVEIEWELQKENSKRWNPEVQYTSNYAKSANVDFTVDNNGLYTEPRPIGTRYLTRPL

SEQ ID NO: 4939 - DNA, 2208 bp, Adeno-associated virus
atggctgccgatggttatcttccagattggctcaaggacactctctctgaaggaataagacagtggtggaagctcaaacctggcccaccaccaccaaagcccgcagagcggcataaggacgacagcgggggtcttgtgcttcctgggtacaagtacctcggacccttcaacggactcgacaagggagagccggtcaacgaggcagacgccgcggccctcgagtacgacaaggcctacgaccggcagctcgacagcggagacaacccgtacctcaagtacaaccacgccgacgcggagtttcaggagcgccttaaagaagatacgtcttttgggggcaacctcggacgagcagtcttccaggcgaaaaagagggttcttgaacctctgggcctggttgaggaacctgttaagacggctccgggaaaaaagaggccggtagagcactctcctgtggagccagactcctcctcgggaacaggaaaagcgggccagcagcctgcgagaaagagattgaattttggtcagactggagacgcagactccgtacctgacccccagcctctcggacagccaccagcagccccctctggtctgggaactaatacgatggctacaggcagtggcgcaccaatggcagacaataacgagggcgccgacggagtgggtaattcctcgggaagttggcattgcgattccacatggatgggcgacagagtcatcaccaccagcacccgaacctgggctctgcccacctacaacaaccatctgtacaagcagatctccagccaatcaggagccagcaacgacaaccactactttggctacagcaccccttgggggtattttgacttcaacagattccactgccacttttcaccacgtgactggcaaagactcatcaacaacaactggggattccggcccaagagactcaacttcaagctctttaacattcaagtcaaggaggtcacgcagaatgacggtacgacgacgattgccaataaccttaccagcacggttcaggtgtttactgactcggagtaccagctcccgtacgtccccggctcggcgcatcaaggatgcctcccgccgttcccagcagacgtcttcatggtgccacagtatggatacctcaccctgaacaacgggagtcaggcagtaggacgctcttcattttactgcctggagtactttccttctcagatgcttcgtaccggaaacaactttaccttcagctacacctttgaggatgttcctttccacagcagctacgctcacagccagagtttggaccgtctcatgaatcctctcatcgaccagtacctgtattacttgagcagaacaaacactccaagcggaaccaccacgcagtccaggcttcagttttctcaggccggagcaagtgacattcgggaccagtctaggaactggcttcctggaccctgttaccgccagcagcgagtatcaaagacagctgcggacaacaacaacagtgaatactcgtggactggagctaccaagtaccacctcaatggcagagactctctggtgaatccgggcccggccatggccagccacaaggacgatgaagaaaagttttttcctcaaagcggggttctcatctttgggaagcaaggctcagagaaaacaaatgtggacattgaaaaggtcatgattacagacgaagaggaaatcagaaccaccaatcccgtggccacggagcagtatggttctgtatctaccaacctccagagcggcaacacacaagcagctactgcagatgtcaacacacaaggcgttcttccaggcatggtctggcaggacagagacgtgcacctgcaggggcctatctgggcaaagattccacacacggacggacattttcacccctctcccctcatgggcggatttggacttaaacaccctcctccacagattctcatcaagaacaccccggtacctgcaaatccttcgaccaccttcagtgcggcaaagtttgcttccttcatcacacagtattccacagggcaggtcagcgtggagatcgagtgggagctgcagaaggagaacagcaaacgctggaaccccgagatccagtacacttccaactacaacaaatctgttaatgtggactttactgtggacactaatggtgtgtattcagagcctcgccccattggcaccagatacctgactcgtaatctgtaa

SEQ ID NO: 4940 - protein, 735 aa, Adeno-associated virus
MAADGYLPDWLKDTLSEGIRQWWKLKPGPPPPKPAERHKDDSGGLVLPGYKYLGPFNGLDKGEPVNEADAAALEYDKAYDRQLDSGDNPYLKYNHADAEFQERLKEDTSFGGNLGRAVFQAKKRVLEPLGLVEEPVKTAPGKKRPVEHSPVEPDSSSGTGKAGQQPARKRLNFGQTGDADSVPDPQPLGQPPAAPSGLGTNTMATGSGAPMADNNEGADGVGNSSGSWHCDSTWMGDRVITTSTRTWALPTYNNHLYKQISSQSGASNDNHYFGYSTPWGYFDFNRFHCHFSPRDWQRLINNNWGFRPKRLNFKLFNIQVKEVTQNDGTTTIANNLTSTVQVFTDSEYQLPYVPGSAHQGCLPPFPADVFMVPQYGYLTLNNGSQAVGRSSFYCLEYFPSQMLRTGNNFTFSYTFEDVPFHSSYAHSQSLDRLMNPLIDQYLYYLSRTNTPSGTTTQSRLQFSQAGASDIRDQSRNWLPGPCYRQQRVSKTAADNNNSEYSWTGATKYHLNGRDSLVNPGPAMASHKDDEEKFFPQSGVLIFGKQGSEKTNVDIEKVMITDEEEIRTTNPVATEQYGSVSTNLQSGNTQAATADVNTQGVLPGMVWQDRDVHLQGPIWAKIPHTDGHFHPSPLMGGFGLKHPPPQILIKNTPVPANPSTTFSAAKFASFITQYSTGQVSVEIEWELQKENSKRWNPEIQYTSNYNKSVNVDFTVDTNGVYSEPRPIGTRYLTRNL

SEQ ID NO: 4941 - DNA, 2208 bp, Adeno-associated virus
atggctgccgatggttatcttccagattggctcgaggacactctctctgaaggaataagacagtggtggaagctcaaacctggcccaccaccaccaaagcccgcagagcggcataaggacgacagcaggggtcttgtgcttcctgggtacaagtacctcggacccttcaacggactcgacaagggggagccggtcaacgaggcagacgccgcggccctcgagcacgacaaggcctacgaccggcagctcgacagcggagacaacccgtacctcaagtacaaccacgccgacgcagagtttcaggagcgccttaaagaagatacgtcttttgggggcaacctcggacgagcagtcttccaggcgaaaaagagggttcttgaacctctgggcctggttgaggaacctgttaagacggctccgggaaaaaagaggccggtagagcactctcctgtggagccagactcctcctcgggaaccggaaaagcgggccagcagcctgcaagaaaaagattaaattttggtcagactggagacgcagactccgtacctgacccccagcctctcggacagccaccagcagccccctctggtctgggatctactacaatggctacaggcagtggcgcaccaatggcagacaataacgagggtgccgatggagtgggtaattcctcaggaaattggcattgcgattcccaatggctgggcgacagagtcatcaccaccagcacccgaacctgggccctgcccacatacaacaaccacctctacaagcaaatctccagccaatcaggagccagcaacgacaaccactactttggctacagcaccccctgggggtattttgacttcaacagattccactgccacttttcaccacgtgactggcaaagactcatcaacaacaactggggattccggcccaaaagactcaacttcaagctctttaatattcaagtcaaagaggtcacgcagaatgacggtacgacgacgattgccaataaccttaccagcacggttcaggtgtttactgactcggagtaccagctcccgtacgtcctgggctcggcgcatcaaggatgcctcccgccgtttccagcggacgtcttcatggtcccacagtatggatacctcaccctgaacaacgggagtcaggcggtaggacgctcttccttttactgcctggagtactttccttctcagatgctgcgtactggaaacaactttcagttcagctacacttttgaagacgtgcctttccacagcagctacgctcacagccagagtctggatcggctgatgaatcctctgatcgaccagtacctgtattatctgaacaagacacaaacaaatagtggaactcttcagcagtctcggctactgtttagccaagctggaccaaccaacatgtctcttcaagctaaaaactggctgcctggaccttgctacagacagcagcgtctgtcaaaacaggcaaacgacaacaacaacagcaactttccctggactgcagctacaaagtatcatctaaatggccgggactcgttggttaatccaggaccagctatggccagtcgcaaggatgacgaagaaaagtttttccccatgcatggaaccctgatatttggtaaacaaggaacaaatgccaacgacgcggatttggaaaatgtcatgattacagatgaagaagaaatcagggccaccaatcccgtggctacggagcagtacgggactgtgtcaaataatttgcaaaactcaaacactggtccaactactggaactgtcaatcaccaaggagcgttacctggtatggtgtggcaggatcgagacgtgtacctgcagggacccatttgggccaagattcctcacaccgatggacactttcatccttctccactgatgggaggttttggactcaaacacccgcctcctcagatcatgatcaaaaacactcccgttccagccaatcctcccacaaacttcagttctgccaagtttgcttctttcatcacacagtattccacgggacaggtcagcgtggagatcgagtgggagctgcagaaggagaacagcaaacgctggaatcccgaaattcagtacacttccaactacaacaagtctgttaatgtggactttactgtggacactaatggtgtgtattcagagcctcgccccattggcaccagatacctgactcgtaatctgtaa

SEQ ID NO: 4942 - protein, 735 aa, Adeno-associated virus
MAADGYLPDWLEDTLSEGIRQWWKLKPGPPPPKPAERHKDDSRGLVLPGYKYLGPFNGLDKGEPVNEADAAALEHDKAYDRQLDSGDNPYLKYNHADAEFQERLKEDTSFGGNLGRAVFQAKKRVLEPLGLVEEPVKTAPGKKRPVEHSPVEPDSSSGTGKAGQQPARKRLNFGQTGDADSVPDPQPLGQPPAAPSGLGSTTMATGSGAPMADNNEGADGVGNSSGNWHCDSQWLGDRVITTSTRTWALPTYNNHLYKQISSQSGASNDNHYFGYSTPWGYFDFNRFHCHFSPRDWQRLINNNWGFRPKRLNFKLFNIQVKEVTQNDGTTTIANNLTSTVQVFTDSEYQLPYVLGSAHQGCLPPFPADVFMVPQYGYLTLNNGSQAVGRSSFYCLEYFPSQMLRTGNNFQFSYTFEDVPFHSSYAHSQSLDRLMNPLIDQYLYYLNKTQTNSGTLQQSRLLFSQAGPTNMSLQAKNWLPGPCYRQQRLSKQANDNNNSNFPWTAATKYHLNGRDSLVNPGPAMASRKDDEEKFFPMHGTLIFGKQGTNANDADLENVMITDEEEIRATNPVATEQYGTVSNNLQNSNTGPTTGTVNHQGALPGMVWQDRDVYLQGPIWAKIPHTDGHFHPSPLMGGFGLKHPPPQIMIKNTPVPANPPTNFSSAKFASFITQYSTGQVSVEIEWELQKENSKRWNPEIQYTSNYNKSVNVDFTVDTNGVYSEPRPIGTRYLTRNL

SEQ ID NO: 4943 - DNA, 2208 bp, Adeno-associated virus
atggctgccgatggttatcttccagattggctcgaggacactctctctgaaggaataagacagtggtggaagctcaaacctggcccaccaccaccaaagcccgcagagcggcataaggacgacagcaggggtcttgtgcttcctgggtacaagtacctcggacccttcaacggactcgacaagggagagccggtcaacgaggcagacgccgcggccctcgagcacgacaaagcctacgaccggcagctcgacagcggagacaacccgtacctcaagtacaaccacgccgacgcggagtttcaggagcgccttaaagaagatacgtcttttgggggcaacctcggacgagcagtcttccaggcgaaaaagagggttcttgaacctctgggcctggttggggaacctgtcaagacggctccaggaaaaaagaggccggtagagcactctcctgtggagccagactcctcctcgggaaccggaaaggcgggccagcagcctgcaagaaaaagattgaattttggtcagactggagacgcagactcagtacctgacccccagcctctcggacagccaccagcagccccctctggtctgggaactaatacgatggctacaggcagtggcgcaccaatggcagacaataacgagggcgccgacggagtgggtaattcctcgggaaattggcattgcgattccacatggatgggcgacagagtcatcaccaccagcacccgaacctgggccctgcccacctacaacaaccacctctacaaacaaatttccagccaatcaggagcctcgaacgacaatcactactttggctacagcaccccttgggggtattttgacttcaacagattccactgccacttttcaccacgtgactggcaaagactcatcaacaacaactggggattccgacccaagagactcaacttcaagctctttaacattcaagtcaaagaggtcacgcagaatgacggtacgacgacgattgccaataaccttaccagcacggttcaggtgtttactgactcggagtaccagctcccgtacgtcctcggctcggcgcatcaaggatgcctcccgccgttcccagcagacgtcttcatggtgccacagtatggatacctcaccctgaacaacgggagtcaggcagtaggacgctcttcattttactgcctggagtactttccttctcagatgctgcgtaccggaaacaactttaccttcagctacacttttgaggacgttcctttccacagcggctacgctcacagccagagtctggaccgtctcatgaatcctctcatcgaccagtacctgtattacttgagcacaacaaacactccaagtggaaccaccacgcagtcaaggcttcagttttctcaggccggagcgagtgacattcgggaccagtctaggaactggcttcctggaccctgttaccgccagcagcgagtatcaaagacatctgcggataacaacaacagtgaatactcgtggactggagctaccaagtaccacctcaatggcagagactctctggtgaatccgggcccggccatggcaagccacaaggacaatgaagaaaagttttttcctcagagcggggttctcatctttgggaagcaaggctcagagaaaacaaatgtggacattgaaaaggtcatgattacagacgaagaggaaatcaggacaaccaatcccgtggctacggagcagtacggttctgtatctaccaacctccagagaggcaacagacaagcagctaccgcagatgtcaacacacaaggcgttcttccaggcatggtctggcaggacagagatgtgtaccttcaggggcccatctgggcaaagattccacacacggacggacattttcacccctctcccctcatgggtggattcggacttaaacaccctcctccacagattctcatcaagaacaccccggtacctgcgaatccttcgaccaccttcagtgcggcaaagtttgcttccttcatcacacagtactccacgggacaggtcagcgtggagatcgagtgggagctgcagaaggaaaacagcaaacgctggaatcccgaaattcagtacacttccaactacaacaagtctgttaatgtggactttactgtggacactaatggcgtgtattcagagcctcgccccattggcaccagatacctgactcgtaatctgtaa

SEQ ID NO: 4944 - protein, 735 aa, Adeno-associated virus
MAADGYLPDWLEDTLSEGIRQWWKLKPGPPPPKPAERHKDDSRGLVLPGYKYLGPFNGLDKGEPVNEADAAALEHDKAYDRQLDSGDNPYLKYNHADAEFQERLKEDTSFGGNLGRAVFQAKKRVLEPLGLVGEPVKTAPGKKRPVEHSPVEPDSSSGTGKAGQQPARKRLNFGQTGDADSVPDPQPLGQPPAAPSGLGTNTMATGSGAPMADNNEGADGVGNSSGNWHCDSTWMGDRVITTSTRTWALPTYNNHLYKQISSQSGASNDNHYFGYSTPWGYFDFNRFHCHFSPRDWQRLINNNWGFRPKRLNFKLFNIQVKEVTQNDGTTTIANNLTSTVQVFTDSEYQLPYVLGSAHQGCLPPFPADVFMVPQYGYLTLNNGSQAVGRSSFYCLEYFPSQMLRTGNNFTFSYTFEDVPFHSGYAHSQSLDRLMNPLIDQYLYYLSTTNTPSGTTTQSRLQFSQAGASDIRDQSRNWLPGPCYRQQRVSKTSADNNNSEYSWTGATKYHLNGRDSLVNPGPAMASHKDNEEKFFPQSGVLIFGKQGSEKTNVDIEKVMITDEEEIRTTNPVATEQYGSVSTNLQRGNRQAATADVNTQGVLPGMVWQDRDVYLQGPIWAKIPHTDGHFHPSPLMGGFGLKHPPPQILIKNTPVPANPSTTFSAAKFASFITQYSTGQVSVEIEWELQKENSKRWNPEIQYTSNYNKSVNVDFTVDTNGVYSEPRPIGTRYLTRNL

SEQ ID NO: 4945 - DNA, 2208 bp, Adeno-associated virus
atggctgccgatggttatcttccagattggctcgaggacactctctctgaaggaataagacagtggtggaagctcaaacctggcccaccaccaccaaagcccgcagagcggcataaggacgacagcaggggtcttgtgcttcctgggtacaagtacctcggacccttcaacggactcgacaagggagagccggtcaacgaggcagacgccgcggccctcgagcacgacaaagcctacgaccggcagctcgacagcggagacaacccgtacctcaagtacaaccacgccgacgcggagtttcaggagcgccttaaagaagatacgtcttttgggggcaacctcggacgagcagtcttccaggcgaaaaagagggttcttgaacctctgggcctggttggggaacctgttaagacggctccgggaaaaaagaggccggtagagcactctcctgtggagccagactcctcctcgggaaccggaaaggcgggccagcagcctgcaagaaaaagattgaattttggtcagactggagacgcagactcagtacctgacccccagcctctcggacagccaccagcagccccctctggtctgggaactaatacgatggctacaggcagtggcgcaccaatggcagacaataacgagggcgccgacggagtgggtaattcctcgggaaatcggcattgcgattccacatggatgggcgacagagtcatcaccaccagcacccgaacctgggccctgcccacctacaacaaccacctctacagacaaatttccagccaatcaggagcctcgaacgacaatcactactttggctacagcaccccttgggggtattttgacttcaacagattccactgccacttttcaccacgtgactggcaaagactcatcaacaacaactggggattccgacccaagagactcaacttcaagctctttaacattcaagtcaaagaggtcacgcagaatgacggtacgacgacgattgccaataaccttaccagcacggttcaggtgtttactgactcggagtaccagctcccgtacgtcctcggctcggcgcatcaaggatgcctcccgccgttcccagcagacgtcttcatggtgccacagtatggatacctcaccctgagcaacgggagtcaggcagtaggacgctcttcattttactgcccggagtactttccttctcagatgctgcgtaccggaaacaactttaccttcagctacacttttgaggacgttcctttccacagcagctacgctcacagccagagtctggaccgtctcatgaatcctctcatcgaccagtacctgtattacttgagcacaacaaacactccaagtggaaccaccacgcagtcaaggcttcagttttctcaggccggagcgagtgacattcgggaccagtctaggaactggcttcctggaccctgttaccgccagcagcgagtatcaaagacatctgcggataacaacaacagtgaatactcgtggactggagctaccaagtaccacctcaatggcagagactctctggtgaatccgggcccggccatggcaagccacaaggacaatgaagaaaagttttttcctcagagcggggttctcatctttgggaagcaaggctcagagaaaacaaatgtggacattgaaaaggtcatgattacagacgaagaggaaatcaggacaaccaatcccgtggctacggagcagtatggttctgtatctaccaacctccagagaggcaacagacaagcagctaccgcagatgtcaacacacaaggcgttcttccaggcatggtctggcaggacagagatgtgtaccttcaggggcccatctgggcaaagattccacacacggacggacattttcacccctctcccctcatgggtggattcggacctaaacaccctcctccacagattctcatcaagaacaccccggtacctgcgaatccttcgaccaccttcagtgcggcaaagtttgcttccttcatcacacagtactccacgggacaggtcagcgtggagatcgagtgggagctgcagaaggaaaacagcaaacgctggaatcccgaaattcagtacacttccaactacaacaagtctgttaatgtggactttactgtggacactaatggcgtgtattcagagcctcgccccattggcaccagatacctgactcgtaatttgtaa

SEQ ID NO: 4946 - protein, 735 aa, Adeno-associated virus
MAADGYLPDWLEDTLSEGIRQWWKLKPGPPPPKPAERHKDDSRGLVLPGYKYLGPFNGLDKGEPVNEADAAALEHDKAYDRQLDSGDNPYLKYNHADAEFQERLKEDTSFGGNLGRAVFQAKKRVLEPLGLVGEPVKTAPGKKRPVEHSPVEPDSSSGTGKAGQQPARKRLNFGQTGDADSVPDPQPLGQPPAAPSGLGTNTMATGSGAPMADNNEGADGVGNSSGNRHCDSTWMGDRVITTSTRTWALPTYNNHLYRQISSQSGASNDNHYFGYSTPWGYFDFNRFHCHFSPRDWQRLINNNWGFRPKRLNFKLFNIQVKEVTQNDGTTTIANNLTSTVQVFTDSEYQLPYVLGSAHQGCLPPFPADVFMVPQYGYLTLSNGSQAVGRSSFYCPEYFPSQMLRTGNNFTFSYTFEDVPFHSSYAHSQSLDRLMNPLIDQYLYYLSTTNTPSGTTTQSRLQFSQAGASDIRDQSRNWLPGPCYRQQRVSKTSADNNNSEYSWTGATKYHLNGRDSLVNPGPAMASHKDNEEKFFPQSGVLIFGKQGSEKTNVDIEKVMITDEEEIRTTNPVATEQYGSVSTNLQRGNRQAATADVNTQGVLPGMVWQDRDVYLQGPIWAKIPHTDGHFHPSPLMGGFGPKHPPPQILIKNTPVPANPSTTFSAAKFASFITQYSTGQVSVEIEWELQKENSKRWNPEIQYTSNYNKSVNVDFTVDTNGVYSEPRPIGTRYLTRNL

SEQ ID NO: 4947 - DNA, 2205 bp, Adeno-associated virus
atggctgccgatggttatcttccagattggctcgaggacactctctctgaaggaataagacagtggtggaagctcaaacctggcccaccaccaccaaagcccgcagagcggcataaggacgacagcaggggtcttgtgcttcctgggtacaagtacctcggacccttcaacggactcgacaagggagagccggtcaacgaggcagacgccgcggccctcgagcacgacaaggcctacgaccggcagctcgacagcggagacaacccgtacctcaagtacaaccacgccgacgcggagtttcaggagcgtcttaaagaagatacgtcttttgggggcaacctcggacgagcagtcttccaggcgaaaaagagggttcttgaacctctgggcctggttgaggaacctgttaagacggctccgggaaaaaagaggccggtagagcactctcctgcggagccagactcctcctcgggaaccggaaaagcgggccagcagcctgcaagaaaaagactgaatttcggtcagactggagacgcagactccgtacctgacccccagcctctcagacagccaccagcagcccccacaagtttgggatctactacaatggctacaggcagtggcgcaccaatggcagacaataacgagggtgccgatggagtgggtaattcctcaggaaattggcattgcgattcccaatggctgggcgacagagtcatcaccaccagcacccgaacctgggccctgcccacctacaacaaccacctttacaagcaaatctccagccaatcaggagcctcaaacgacaaccactactttggctacagcaccccctgggggtattttgacttcaacagattccactgccacttttcaccacgtgactggcaaagactcatcaacaacaactggggattccgacccaagagactcaacttcaagctctttaacattcaagtcaaagaggtcacgcagaatgacggtacgacgacgattgccaataaccttaccagcacggttcaggtgtttactgactcggagtaccagctcccgtacgtcctcggctcggcgcatcaaggatgcctcccgccgtttccagcggacgtcttcatggtcccacagtatggatacctcaccctgaacaacgggagtcaggcggtaggacgctcttccttttactgcctggagtactttccttctcagatgctgcgtactggaaacaactttcagttcagctacacttttgaagacgtgcctttccacagcagctacgctcacagccagagtttggatcggctgatgaatcctctgatcgaccagtacctgtattatctaaacagaacacaaacagctagtggaactcagcagtctcggctactgtttagccaagctggacccacaagcatgtctcttcaagctaaaaactggctgcctggaccgtgttatcgccagcagcgtttgtcaaagcaggcaaacgacaacaacaacagcaactttccctggactggagctaccaagtactacctcaatggcagagactctttggtgaacccgggcccggccatggccagccacaaggacgatgaagaaaagtttttccccatgcatggaaccctaatatttggtaaagaaggaacaaatgctaccaacgcggaattggaaaatgtcatgattacagatgaagaggaaatcaggaccaccaatcccgtggctacagagcagtacggatatgtgtcaaataatttgcaaaactcaaatactgctgcaagtactgaaactgtgaatcaccaaggagcattacctggtatggtgtggcaggatcgagacgtgtacctgcagggacccatttgggccaagattcctcacaccgatggacactttcatccttctccactgatgggaggttttggactcaaacacccgcctcctcagattatgatcaaaaacactcccgttccagccaatcctcccacaaacttcagttctgccaagtttgcttccttcatcacacagtattccacgggacaggtcagcgtggagatcgagtgggagctgcagaaggagaacagcaaacgctggaatcccgaaattcagtacacttccaactacaacaaatctgttaatgtggactttactgtggacactaatggtgtgtattcagagcctcgccccattggcaccagatacctgactcgtaatctgtaa

SEQ ID NO: 4948 - protein, 734 aa, Adeno-associated virus
MAADGYLPDWLEDTLSEGIRQWWKLKPGPPPPKPAERHKDDSRGLVLPGYKYLGPFNGLDKGEPVNEADAAALEHDKAYDRQLDSGDNPYLKYNHADAEFQERLKEDTSFGGNLGRAVFQAKKRVLEPLGLVEEPVKTAPGKKRPVEHSPAEPDSSSGTGKAGQQPARKRLNFGQTGDADSVPDPQPLRQPPAAPTSLGSTTMATGSGAPMADNNEGADGVGNSSGNWHCDSQWLGDRVITTSTRTWALPTYNNHLYKQISSQSGASNDNHYFGYSTPWGYFDFNRFHCHFSPRDWQRLINNNWGFRPKRLNFKLFNIQVKEVTQNDGTTTIANNLTSTVQVFTDSEYQLPYVLGSAHQGCLPPFPADVFMVPQYGYLTLNNGSQAVGRSSFYCLEYFPSQMLRTGNNFQFSYTFEDVPFHSSYAHSQSLDRLMNPLIDQYLYYLNRTQTASGTQQSRLLFSQAGPTSMSLQAKNWLPGPCYRQQRLSKQANDNNNSNFPWTGATKYYLNGRDSLVNPGPAMASHKDDEEKFFPMHGTLIFGKEGTNATNAELENVMITDEEEIRTTNPVATEQYGYVSNNLQNSNTAASTETVNHQGALPGMVWQDRDVYLQGPIWAKIPHTDGHFHPSPLMGGFGLKHPPPQIMIKNTPVPANPPTNFSSAKFASFITQYSTGQVSVEIEWELQKENSKRWNPEIQYTSNYNKSVNVDFTVDTNGVYSEPRPIGTRYLTRNL

SEQ ID NO: 4949 - DNA, 3160 bp, Adeno-associated virus
acccttcactaaagggactagtcctgcaggtttaaacgaattcgcccttgctgcgtcaactggaccaatgagaactttcccttcaacgactgtgtcgacaagatggtgatttggtgggaggaggggaagatgaccgccaaggtcgtggagtcggccaaagccattctcggaggaagcaaggtgcgcgtggaccagaaatgcaagtcctcggcccagatagatccgactcccgtgatcgtcacctccaacaccaacatgtgcgccgtgattgacgggaactcaacgaccttcgaacaccagcagccgttgcaagaccggatgttcaaatttgaactcacccgccgtctggatcatgactttgggaaggtcaccaagcgggaagtcaaagactttttccggtgggcaaaggatcacgtggttgaggtggagcatgaattctacgtcaaaaagggtggagccaagaaaagacccgcccctagtgacgcagatataagtgagcccaaacgggtgcgcgagtcagttgcgcagccatcgacgtcagacgcggaagcttcgatcaactacgcggacaggtaccaaaacaaatgttctcgtcacgtgggcatgaatctgatgctgtttccctgcagacaatgcgagagaatgaatcaaaattcaaatatctgcttcactcacggacagaaagactgtttagagtgctttcccgtgtcagaatctcaacctgtttctgtcgtcaaaaaggcgtatcagaaactgtgctacattcatcatatcatgggaaaggtgccagacgcttgcactgcctgcgatctggtcaatgtggatttggatgactgcatctctgaacaataaatgatttaaatcaggtatggctgccgatggttatcttccagattggctcgaggacactctctctgaaggaataagacagtggtggaagctcaaacctggcccaccaccaccaaagcccgcagagcggcataaggacgacagcaggggtcttgtgcttcctgggtacaagtacctcggacccttcaacggactcgacaagggagagccggtcaacgaggcagacgccgcggccctcgagcacgacaaggcctacgaccggcagctcgacagcggagacaacccgtacctcaagtacaaccacgccgacgcggagtttcaggagcgtcttaaagaagatacgtcttttgggggcaacctcggacgagcagtcttccaggcgaaaaagagggttcttgaacctctgggcctggttgaggaacctgttaagacggctccgggaaaaaagaggccggtagagcactctcctgcggagccagactcctcctcgggaaccggaaaagcgggccagcagcctgcaagaaaaagactgaatttcggtcagactggagacgcagactccgtacctgacccccagcctctcagacagccaccagcagcccccacaagtttgggatctactacaatggctacaggcagtggcgcaccaatggcagacaataacgagggtgccgatggagtgggtaattcctcaggaaattggcattgcgattcccaatggctgggcgacagagtcatcaccaccagcacccgaacctgggccctgcccacctacaacaaccacctttacaagcaaatctccagccaatcaggagcctcaaacgacaaccactactttggctacagcaccccctgggggtattttgacttcaacagattccactgccacttttcaccacgtgactggcaaagactcatcaacaacaactggggattccgacccaagagactcaacttcaagctctttaacattcaagtcaaagaggtcacgcagaatgacggtacgacgacgattgccaataaccttaccagcacggttcaggtgtttactgactcggagtaccagctcccgtacgtcctcggctcggcgcatcaaggatgcctcccgccgtttccagcggacgtcttcatggtcccacagtatggatacctcaccctgaacaacgggagtcaggcggtaggacgctcttccttttactgcctggagtactttccttctcagatgctgcgtactggaaacaactttcagttcagctacacttttgaagacgtgcctttccacagcagctacgctcacagccagagtttggatcggctgatgaatcctctgatcgaccagtacctgtattatctaaacagaacacaaacagctagtggaactcagcagtctcggctactgtttagccaagctggacccacaagcatgtctcttcaagctaaaaactggctgcctggaccgtgttatcgccagcagcgtttgtcaaagcaggcaaacgacaacaacaacagcaactttccctggactggagctaccaagtactacctcaatggcagagactctttggtgaacccgggcccggccatggccagccacaaggacgatgaagaaaagtttttccccatgcatggaaccctaatatttggtaaagaaggaacaaatgctaccaacgcggaattggaaaatgtcatgattacagatgaagaggaaatcaggaccaccaatcccgtggctacagagcagtacggatatgtgtcaaataatttgcaaaactcaaatactgctgcaagtactgaaactgtgaatcaccaaggagcattacctggtatggtgtggcaggatcgagacgtgtacctgcagggacccatttgggccaagattcctcacaccgatggacactttcatccttctccactgatgggaggttttggactcaaacacccgcctcctcagattatgatcaaaaacactcccgttccagccaatcctcccacaaacttcagttctgccaagtttgcttccttcatcacacagtattccacgggacaggtcagcgtggagatcgagtgggagctgcagaaggagaacagcaaacgctggaatcccgaaattcagtacacttccaactacaacaaatctgttaatgtggactttactgtggacactaatggtgtgtattcagagcctcgccccattggcaccagatacctgactcgtaatctgtaattgcttgttaatcaataaaccgtttaattcgtttcagttgaactttggtctctgcgaagggcgaattcgcggccgctaaatcaatcg

SEQ ID NO: 4950 - protein, 734 aa, Adeno-associated virus
MAADGYLPDWLEDTLSEGIRQWWKLKPGPPPPKPAERHKDDSRGLVLPGYKYLGPFNGLDKGEPVNEADAAALEHDKAYDRQLDSGDNPYLKYNHADAEFQERLKEDTSFGGNLGRAVFQAKKRVLEPLGLVEEPVKTAPGKKRPVEHSPAEPDSSSGTGKAGQQPARKRLNFGQTGDADSVPDPQPLGQPPAAPTSLGSTTMATGSGAPMADNNEGADGVGNSSGNWHCDSQWLGDRVITTSTRTWALPTYNNHLYKQISSQSGASNDNHYFGYSTPWGYFDFNRFHCRFSPRDWQRLINNNWGFRPKRLNFKLFNIQVKEVTQNDGTTTIANNLTSTVQVFTDSEYQLPYVLGSAHQGCLPPFPADVFMVPQYGYLTLNNGSQAVGRSSFYCLEYFPSQMLRTGNNFQFSYTFEDVPFHSSYAHSQGLDRLMNPLIDQYLYYLNRTQTASGTQQSRLLFSQAGPTSMSLQAKNWLPGPCYRQQRLSKQANDNNNSNFPWTGATKYHLNGGDSLVNPGPAMASHKDDEEKFFPMHGTLIFGKEGTNATNAELENVMITDEEEIRTTNPVATEQYGYVSNNLQNSNTAASTETVNHQGALPGMVWQDRDVYLRGPIWAKIPHADGHFHPSPLMGGFGLKHPPPQIMIKNTPVPANPPTNFSSAKFASFITQYSTGQVSVEIEWELQKENSKRWNPEIQYTSNYNKSVNVDFTVDTNGVYSEPRPIGTRYLTRNL

SEQ ID NO: 4951 - DNA, 3157 bp, Adeno-associated virus
ctcactaagggactagtcctgcaggtttaaacgaattcgcccttgctgcgtcaactggaccaatgagaactttcccttcaacgactgtgtcgacaagatggtgatttggtgggaggaggggaagatgaccgccaaggtcgtggagtcggccaaagccactctcggaggaagcaaggtgcgcgtggaccagaaacgcaagtcctcggcccagatagatccgactcccgtgatcgtcacctccaacaccaacatgtgcgccgtgattgacgggaactcaacgaccttcgaacaccagcagccgttgcaagaccgaatgttcaaatttgaactcacccgccgtctggatcatgacttcgggaaggtcaccaagcaggaagtcaaagactttttccggtgggcaaaggatcacgtggttgaggtggagcatgaattctacgtcaaaaagggtggagccaagaaaagacccgcccctagtgacgcagatataagtgagcccaaacgggtgcgcgagtcagttgcgcagccatcgacgtcagacgcggaagcttcgatcaactacgcggacaggtaccaaaacaaatgttctcgtcacgtgggcatgaatctgatgctgtttccctgcagacaatgcgagagaatgaatcaaaattcaaatatctgcttcactcacggacagaaagactgtttagagtgctttcccgtgtcagaatctcaacctgtttctgtcgtcaaaaaggcgtatcagaaactgtgctacattcatcatatcatgggaaaggtgccagacgcttgcactgcctgcgatctggtcaatgtggatttggatgactgcatctctgaacaataaatgatttaaatcaggtatggctgccgatggttatcttccagattggctcgaggacactctctctgaaggaataagacagtggtggaagctcaaacctggcccaccaccaccaaagcccgcagagcggcataaggacgacagcaggggtcttgtgcttcctgggtacaagtacctcggacccttcaacggactcgacaagggagagccggtcaacgaggcagacgccgcggctctcgagcacgacaaggcctacgaccggcagctcgacagcggagacaacccgtacctcaagtacaaccacgccgacgcggagtttcaggagcgtcttaaagaagatacgtcttttgggggcaacctcggacgagcagtcttccaggcgaaaaagagggttcttgaacctctgggcctggttgaggaacctgttaagacggctccgggaaaaaagaggccggtagagcactctcctgcggagccagactcctcctcgggaaccggaaaagcgggccagcagcctgcaagaaaaagactgaatttcggtcagactggagacgcagactccgtacctgacccccagcctctcggacagccaccagcagcccccacaagtttgggatctactacaatggctacaggcagtggcgcaccaatggcagacaataacgagggtgccgatggagtgggtaattcctcaggaaattggcattgcgattcccaatggctgggcgacagagtcatcaccaccagcacccgaacctgggccctgcccacctacaacaaccacctttacaagcaaatctccagccaatcaggagcctcaaacgacaaccactactttggctacagcaccccctgggggtattttgacttcaacagattccactgccgcttttcaccacgtgactggcaaagactcatcaacaacaactggggattccgacccaagagactcaacttcaagctctttaacattcaagtcaaagaggtcacgcagaatgacggtacgacgacgattgccaataaccttaccagcacggttcaggtgtttactgactcggagtaccagctcccgtacgtcctcggctcggcgcatcaaggatgcctcccgccgtttccagcggacgtcttcatggtcccacagtatggatacctcaccctgaacaacgggagtcaggcggtaggacgctcttccttttactgcctggagtactttccttctcagatgctgcgtactggaaacaactttcagttcagctacacttttgaagacgtgcctttccacagcagctacgctcacagccagggtttggatcggctgatgaatcctctgatcgaccagtacctgtattatctaaacagaacacaaacagctagtggaactcagcagtctcggctactgtttagccaagctggacccacaagcatgtctcttcaagctaaaaactggctgcctggaccgtgttatcgccagcagcgtttgtcaaagcaggcaaacgacaacaacaacagcaactttccctggactggagctaccaagtaccacctcaatggcggagactctttggtgaacccgggcccggccatggccagccacaaggacgatgaagaaaagtttttccccatgcatggaaccctaatatttggtaaagaaggaacaaatgctaccaacgcggaattggaaaatgtcatgattacagatgaagaggaaatcaggaccaccaatcccgtggctacagagcagtacggatatgtgtcaaataatttgcaaaactcaaatactgctgcaagtactgaaactgtgaatcaccaaggagcattacctggtatggtgtggcaggatcgagacgtgtacctgcggggacccatttgggccaagattcctcacgccgatggacactttcatccttctccactgatgggaggttttggactcaaacacccgcctcctcagattatgatcaaaaacactcccgttccagccaatcctcccacaaacttcagttctgccaagtttgcttccttcatcacacagtattccacgggacaggtcagcgtggagatcgagtgggagctgcagaaggagaacagcaaacgctggaatcccgaaattcagtacacttccaactacaacaaatctgttaatgtggactttactgtggacactaatggtgtgtattcagagcctcgccccattggcaccagatacctgactcgtaatctgtaattgcttgttaatcaataaaccgtttaattcgtttcagttgaactttggtctctgcgaagggcgaattcgcggccgctaaattcaattcg

SEQ ID NO: 4952 - protein, 734 aa, Adeno-associated virus
MAADGYLPDWLEDTLSEGIRQWWKLKPGPPPPKPAERHKDDSRGLVLPGYKYLGPFNGLDKGEPVNEADAAALEHDKAYDRQLDSGDNPYLKYNHADAEFQERLKEDTSFGGNLGRAVFQAKKRVLEPLGLVEEPVKTAPGKKRPVEHSPAEPDSSSGTGKAGQQPARKRLNFGQTGDADSVPDPQPLGQPPAAPTSLGSTTMATGSGAPMADNNEGADGVGNSSGNWHCDSQWLGDRVITTSTRTWALPTYNNHLYKQISSQSGASNDNHYFGYSTPWGYFDFNRFHCHFSPRDWQRLINNNWGFRPKRLNFKLFNIQVKEVTQNDGTTTIANNLTSTVQVFTDSEYQLPYVLGSAHQGCLPPFPADVFMVPQYGYLTLNNGSQAVGRSSFYCLECFPSQMLRTGNNFQFSYTFEDVPFHSSYAHSQSLDRLMNPLIDQYLYYLNRTQTASGTQQSRLLFSQAGPTSMSLQAKNWLPGPCYRQQRLSKQANDNNNSNFPWTGATKYHLNGRDSLVNPGPAMASHKDDEEKFFPMHGTLIFGKEGTNATNAELENVMITDEEEIRTTNPVATEQYGYVSNNLQNSNTAASTETVNHQGALPGMVWQDRDVYLQGPIWAKIPHTDGHFHPSPLMGGFGLKHPPPQIMIKNTPVPANPPTNFSSAKFASFITQYSTGQVSVEIEWELQKENSKRWNPEIQYTSNYNKSVNVDFTVDTNGVYSEPRPIGTRYLTRNL

SEQ ID NO: 4953 - DNA, 2208 bp, Adeno-associated virus
atggctgccgatggttatcttccagattggctcgaggacactctctctgaaggaataagacagtggtggaagctcaaacctggcccaccaccaccaaagcccgcagagcggcataaggacgacagcaggggtcttgtgcttcctggatacaagtacctcggacccttcaacggactcgacaagggagagccggtcaacgaggcagacgccgcggccctcgagcacgacaaggcctacgaccggcagctcgacagcggagacaacccgtacctcaagtacaaccacgccgacgcggagtttcaggagcgccttaaagaagatacgtcttttgggggcaacctcggacgagcagtcttccaggcgaaaaagagggttcttgaacctctgggcctggttgaggaacctgttaagacggctccgggaaaaaagaggccggtagagcactctcctgtggagccagactcctcctcgggaaccggaaaagcgggcaaccagcctgcaagaaaaagattgaatttcggtcagactggagacgcagactccgtacctgacccccagcctctcggacagccaccagcatccccctctggtctgggaactaatacgatggctacaggcagtggcgcaccaatggcagacaataacgagggcgccgacggagtgggtaattcctcgggaaattggcattgcgattccacatggatgggcgacagagtcgtcaccaccagcacccgcacctgggccctgcccacctacaacaaccacctctacaagcagatttccagccaatcaggagccagcaacgacaaccactactttggctacagcaccccttgggggtattttgacttcaacagattccactgccacttttcgccacgcgactggcagagactcatcaacaacaactggggattccggcccaaaagactcaacttcaagctgtttaacattcaagtcaaggaggtcacgcagaatgacggtacgacgacgattgccaataaccttaccagcacggttcaggtgtttactgacttggagtaccagctcccgtacgtcctcggctcggcgcatcaaggatgcctcccgccgttcccagcagacgtcttcatggtgccacagtatggatacctcaccctgaacaacgggagtcaggcggtaggacgctcttccttttactgcctggagtactttccttctcagatgcttcgcaccggaaacaactttaccttcagctacacttttgaagacgttcctttccacagcagctacgctcacagtcaaagtctggaccgtctcatgaatcctctcatcgaccagtacctgtattacttgagcagaacaaacactccaagcggaaccactacgcagtccaggcttcagttttctcaggccggagcgagtgacattcgggaccagtctaggaactggcttcctggaccctgttaccgccagcagcgagtatcaaagacagctgcggataacaacaacagtgaatactcgtggactggagctaccaagtaccacctcaatggcagagactctctggtgaatccgggcccggccatggccagccacaaggacgatgaagaaaagttttttcctcaaagcggggttctcatctttgggaagcaaggctcagagaaaacaaatgtggacattgaaaaggtcatgattacagacgaagaggaaatcaggaccaccaatcccgtggctacggagcagtatggttctgtatctaccaacctccagagcggcaacacacaagcagctacctcagatgtcaacacacaaggcgttcttccaggcatggtctggcaggacagagacgtgtacctgcaggggcccatctgggcaaaaattccacacacggacggacattttcacccctctcccctcatgggcggatttggacttaaacaccctcctccacagattctcattaagaataccccggtacctgcgaatccttcgaccaccttcagcgcggcaaagtttgcttccttcatcacacagtattccacggggcaggtcagcgtggagatcgagtgggagctgcagaaggagaacagcaaacgctggaatcccgaaattcagtacacttccaactacaacaaatctgttaatgtggactttactgtggacactaatggggtgtattcagagcctcgccctattggcaccagatacctgactcgtaatctgtaa

SEQ ID NO: 4954 - DNA, 3159 bp, Adeno-associated virus
gattgatttagcggccgcgaattcgcccttgctgcgtcaactggaccaatgagaactttcccttcaacgattgcgtcgacaagatggtgatctggtgggaggagggaaagatgaccgccaaggtcgtggagtcggccaaagccattctcggaggaagcaaggtgcgtgtggaccaaaagtgcaagtcttcggcccagatcgacccgactcccgtgatcgtcacctccaacaccaacatgtgcgccgtgattgatggaaactcaacgaccttcgagcaccagcagccgttgcaagaccggatgttcaaatttgaacttacccgccgtctggatcatgactttggaaaggtcaccaagcaggaagtgaaagactttttccggtgggcaaaggatcacgtggttgaggtggagcatgagttctacgtcaaaaagggtggagccaaaaaaagacccgcccccagtgacgcagatataagtgagcccaaacgggcgcgcgagtcagttgcgcagccatcgacgtcagacgcggaagcttcgatcaactacgcggacaggtaccaaaacaaatgttctcgtcacgtgggcatgaatctgatgctgtttccctgcagacaatgcgagagaatgaatcagaattcaaatatctgcttcactcacggacagaaagactgtccatagtgctttcccgtgtcagaatctcaacccgtttctgtcgtcaaaaaggcgtatcagaaactgtgctacattcatcacatcatgggaaaggtgccagacgcttgcactgcttgcgacctggtcaatgtggatttggatgactgcatctctgaacaataaatgatttaaatcaggtatggctgccgatggttatcttccagattggctcgaggacactctctctgaaggaataagacagtggtggaagctcaaacctggcccaccaccaccaaagcccgcagagcggcataaggacgacagcaggggtcttgtgcttcctggatacaagtacctcggacccttcaacggactcgacaagggagagccggtcaacgaggcagacgccgcggccctcgagcacgacaaggcctacgaccggcagctcgacagcggagacaacccgtacctcaagtacaaccacgccgacgcggagtttcaggagcgccttaaagaagatacgtcttttgggggcaacctcggacgagcagtcttccaggcgaaaaagagggttcttgaacctctgggcctggttgaggaacctgttaagacggctccgggaaaaaagaggccggtagagcactctcctgtggagccagactcctcctcgggaaccggaaaagcgggcaaccagcctgcaagaaaaagattgaatttcggtcagactggagacgcagactccgtacctgacccccagcctctcggacagccaccagcatccccctctggtctgggaactaatacgatggctacaggcagtggcgcaccaatggcagacaataacgagggcgccgacggagtgggtaattcctcgggaaattggcattgcgattccacatggatgggcgacagagtcgtcaccaccagcacccgcacctgggccctgcccacctacaacaaccacctctacaagcagatttccagccaatcaggagccagcaacgacaaccactactttggctacagcaccccttgggggtattttgacttcaacagattccactgccacttttcgccacgcgactggcagagactcatcaacaacaactggggattccggcccaaaagactcaacttcaagctgtttaacattcaagtcaaggaggtcacgcagaatgacggtacgacgacgattgccaataaccttaccagcacggttcaggtgtttactgacttggagtaccagctcccgtacgtcctcggctcggcgcatcaaggatgcctcccgccgttcccagcagacgtcttcatggtgccacagtatggatacctcaccctgaacaacgggagtcaggcggtaggacgctcttccttttactgcctggagtactttccttctcagatgcttcgcaccggaaacaactttaccttcagctacacttttgaagacgttcctttccacagcagctacgctcacagtcaaagtctggaccgtctcatgaatcctctcatcgaccagtacctgtattacttgagcagaacaaacactccaagcggaaccactacgcagtccaggcttcagttttctcaggccggagcgagtgacattcgggaccagtctaggaactggcttcctggaccctgttaccgccagcagcgagtatcaaagacagctgcggataacaacaacagtgaatactcgtggactggagctaccaagtaccacctcaatggcagagactctctggtgaatccgggcccggccatggccagccacaaggacgatgaagaaaagttttttcctcaaagcggggttctcatctttgggaagcaaggctcagagaaaacaaatgtggacattgaaaaggtcatgattacagacgaagaggaaatcaggaccaccaatcccgtggctacggagcagtatggttctgtatctaccaacctccagagcggcaacacacaagcagctacctcagatgtcaacacacaaggcgttcttccaggcatggtctggcaggacagagacgtgtacctgcaggggcccatctgggcaaaaattccacacacggacggacattttcacccctctcccctcatgggcggatttggacttaaacaccctcctccacagattctcattaagaataccccggtacctgcgaatccttcgaccaccttcagcgcggcaaagtttgcttccttcatcacacagtattccacggggcaggtcagcgtggagatcgagtgggagctgcagaaggagaacagcaaacgctggaatcccgaaattcagtacacttccaactacaacaaatctgttaatgtggactttactgtggacactaatggggtgtattcagagcctcgccctattggcaccagatacctgactcgtaatctgtaattgcttgttaatcaataaaccgtttaattcgtttcagttgaactttggtctctgcgaagggcgaattcgtttaaacctgcaggactagtccctttagtgagg

SEQ ID NO: 4955 - protein, 735 aa, Adeno-associated virus
MAADGYLPDWLEDTLSEGIRQWWKLKPGPPPPKPAERHKDDSRGLVLPGYKYLGPFNGLDKGEPVNEADAAALEHDKAYDRQLDSGDNPYLKYNHADAEFQERLKEDTSFGGNLGRAVFQAKKRVLEPLGLVEEPVKTAPGKKRPVEHSPVEPDSSSGTGKAGNQPARKRLNFGQTGDADSVPDPQPLGQPPASPSGLGTNTMATGSGAPMADNNEGADGVGNSSGNWHCDSTWMGDRVVTTSTRTWALPTYNNHLYKQISSQSGASNDNHYFGYSTPWGYFDFNRFHCHFSPRDWQRLINNNWGFRPKRLNFKLFNIQVKEVTQNDGTTTIANNLTSTVQVFTDLEYQLPYVLGSAHQGCLPPFPADVFMVPQYGYLTLNNGSQAVGRSSFYCLEYFPSQMLRTGNNFTFSYTFEDVPFHSSYAHSQSLDRLMNPLIDQYLYYLSRTNTPSGTTTQSRLQFSQAGASDIRDQSRNWLPGPCYRQQRVSKTAADNNNSEYSWTGATKYHLNGRDSLVNPGPAMASHKDDEEKFFPQSGVLIFGKQGSEKTNVDIEKVMITDEEEIRTTNPVATEQYGSVSTNLQSGNTQAATSDVNTQGVLPGMVWQDRDVYLQGPIWAKIPHTDGHFHPSPLMGGFGLKHPPPQILIKNTPVPANPSTTFSAAKFASFITQYSTGQVSVEIEWELQKENSKRWNPEIQYTSNYNKSVNVDFTVDTNGVYSEPRPIGTRYLTRNL

SEQ ID NO: 4956 - DNA, 2205 bp, Adeno-associated virus
atggctgccgatggttatcttccagattggctcgaggacactctctctgaaggaataagacagtggtggaagctcaaacctggcccaccaccaaagcccgcagagcggcataaggacgacagcaggggtcttgtgcttcctggatacaagtacctcggacccttcaacggactcgacaagggagagccggtcaacgaggcagacgccgcggccctcgagcacgacaaggcctacgaccggcagctcgacagcggagacaacccgtacctcaagtacaaccacgccgacgcggagtttcaggagcgccttaaagaagatacgtcttttgggggcaacctcggacgagcagtcttccaggcgaaaaagagggttcttgaacctctgggcctggttgaggaacctgttaagacggctccgggaaaaaagaggcccgtagagcactctcctgtggagccagactcctcctcgggaaccggaaaagcgggcaaccagcctgcaagaaaaagattgaatttcggtcagactggagacgcagactccgtacctgacccccagcctctcggacagccaccagcagccccctctggtctgggaactaatacgatggctacaggcagtggcgcaccaatggcagacaataacgagggcgccgacggagtgggtaattcctcgggagattggcattgcgattccacatggatgggcgacagagtcatcaccaccagcacccgcacctgggccctgcccacctacaacaaccacctctacaagcagatttccagccaatcaggagccagcaatgacaaccactactttggctacagcaccccttgggggtattttgacttcaacagattccactgccacttttcgccacgcgactggcagagactcatcaacaacaactggggattccggcccaaaagactcaacctcaagctgtttaacattcaagtcaaggaggtcacgcagaatgacggtacgacgacgattgccaataaccttaccagcacggttcaggtgtttactgacttggagtaccagctcccgtacgtcctcggctcggcgcatcaaggatgcctcccgccgttcccagcagacgtcttcatggtgccacagtatggatacctcaccctgaacaacgggagtcaggcggtaggacgctcttccttttactgcctggagtactttccttctcagatgcttcgtaccggaaacaactttaccttcagctacacttttgaagacgttcctttccacagcagctacgctcacagtcaaagtctggaccgtctcatgaatcctctcatcgaccagtacctgtattacttgagcagaacaaacactccaagcggaaccactacgcagtccaggcttcagttttctcaggccggagcgagtgacattcgggaccagtctaggaactggcttcctggaccctgttaccgccagcagcgagtatcaaagacagctgcggataacaacaacggtgaatactcgtggactggagctaccaagtaccacctcaatggcagagactctctggtgaatccgggcccggccatggccagccacaaggacgatgaagaaaagttttttcctcaaagcggggttctcatctttgggaagcaaggctcagagaaaacaaatgtggacattgaaaaggtcatgattacagacgaagaggaaatcaggaccaccaatcccgtggctacggagcagtatggttctgtatctaccaacctccagagcggcaacacacgagcagctacctcagatgtcaacacacaaggcgttcttccaggcatggtctggcaggacagagacgtgtacctgcaggggcccatctgggcaaaaattccacacacggacggacattttcacccctctcccctcatgggcggatttggacttaaacaccctcctccacagattctcattaagaataccccggtacctgcgaatccttcgaccaccttcagcgcggcaaagtttgcttccttcatcacacagtattccacggggcaggtcagcgtggagatcgagtgggagctgcagaaggagaacagcaaacgctggaatcccgaaattcagtacacttccaactacaacaaatctgttaatgtggactttactgtggacactaatggggtgtattcagagcctcgccctattggcaccagatacctgactcgtaatctgtaa

SEQ ID NO: 4957 - DNA, 3156 bp, Adeno-associated virus
cgattgaatttagcggccgcgaattcgcccttgctgcgtcaacggaccaatgagaactttcccttcaacgattgcgtcgacaagatggtgatctggtgggaggagggaaagatgaccgccaaggtcgtggagtcggccaaagccattctcggaggaagcaaggtgcgtgtggaccaaaagtgcaagtcttcggcccagatcgacccgactcccgtgatcgtcacctccaacaccaacatgtgcgccgtgattgatggaaactcaacgaccttcgagcaccagcagccgttgcaagaccggatgttcaaatttgaacttacccgccgtctggatcatgactttggaaaggtcaccaagcaggaagtgaaagactttttccggtgggcaaaggatcacgtggttgaggtggagcatgagttctacgtcaaaaagggtggagccaaaaaaagacccgcccccagtgacgcagatataagtgagcccaaacgggcgcgcgagtcagttgcgcagccatcgacgtcagacgcggaagcttcgatcaactacgcggacaggtaccaaaacaaatgttctcgtcacgtgggcatgaatctgatgctgtttccctgcagacaatgcgagcgaatgaatcagaattcaaatatctgcttcactcacggacagaaagactgtttagagtgctttcccgtgtcagaatctcaacccgtttctgtcgtcaaaaaggcgtatcagaaactgtgctacattcatcacatcatgggaaaggtgccagacgcttgcactgcttgcgacctggtcaatgtggatttggatgactgcatctctgaacaataaatgatttaaatcaggtatggctgccgatggttatcttccagattggctcgaggacactctctctgaaggaataagacagtggtggaagctcaaacctggcccaccaccaaagcccgcagagcggcataaggacgacagcaggggtcttgtgcttcctggatacaagtacctcggacccttcaacggactcgacaagggagagccggtcaacgaggcagacgccgcggccctcgagcacgacaaggcctacgaccggcagctcgacagcggagacaacccgtacctcaagtacaaccacgccgacgcggagtttcaggagcgccttaaagaagatacgtcttttgggggcaacctcggacgagcagtcttccaggcgaaaaagagggttcttgaacctctgggcctggttgaggaacctgttaagacggctccgggaaaaaagaggcccgtagagcactctcctgtggagccagactcctcctcgggaaccggaaaagcgggcaaccagcctgcaagaaaaagattgaatttcggtcagactggagacgcagactccgtacctgacccccagcctctcggacagccaccagcagccccctctggtctgggaactaatacgatggctacaggcagtggcgcaccaatggcagacaataacgagggcgccgacggagtgggtaattcctcgggagattggcattgcgattccacatggatgggcgacagagtcatcaccaccagcacccgcacctgggccctgcccacctacaacaaccacctctacaagcagatttccagccaatcaggagccagcaatgacaaccactactttggctacagcaccccttgggggtattttgacttcaacagattccactgccacttttcgccacgcgactggcagagactcatcaacaacaactggggattccggcccaaaagactcaacctcaagctgtttaacattcaagtcaaggaggtcacgcagaatgacggtacgacgacgattgccaataaccttaccagcacggttcaggtgtttactgacttggagtaccagctcccgtacgtcctcggctcggcgcatcaaggatgcctcccgccgttcccagcagacgtcttcatggtgccacagtatggatacctcaccctgaacaacgggagtcaggcggtaggacgctcttccttttactgcctggagtactttccttctcagatgcttcgtaccggaaacaactttaccttcagctacacttttgaagacgttcctttccacagcagctacgctcacagtcaaagtctggaccgtctcatgaatcctctcatcgaccagtacctgtattacttgagcagaacaaacactccaagcggaaccactacgcagtccaggcttcagttttctcaggccggagcgagtgacattcgggaccagtctaggaactggcttcctggaccctgttaccgccagcagcgagtatcaaagacagctgcggataacaacaacggtgaatactcgtggactggagctaccaagtaccacctcaatggcagagactctctggtgaatccgggcccggccatggccagccacaaggacgatgaagaaaagttttttcctcaaagcggggttctcatctttgggaagcaaggctcagagaaaacaaatgtggacattgaaaaggtcatgattacagacgaagaggaaatcaggaccaccaatcccgtggctacggagcagtatggttctgtatctaccaacctccagagcggcaacacacgagcagctacctcagatgtcaacacacaaggcgttcttccaggcatggtctggcaggacagagacgtgtacctgcaggggcccatctgggcaaaaattccacacacggacggacattttcacccctctcccctcatgggcggatttggacttaaacaccctcctccacagattctcattaagaataccccggtacctgcgaatccttcgaccaccttcagcgcggcaaagtttgcttccttcatcacacagtattccacggggcaggtcagcgtggagatcgagtgggagctgcagaaggagaacagcaaacgctggaatcccgaaattcagtacacttccaactacaacaaatctgttaatgtggactttactgtggacactaatggggtgtattcagagcctcgccctattggcaccagatacctgactcgtaatctgtaattgcttgttaatcaataaaccgtttaattcgtttcagttgaactttggtctctgcgaagggcgaattcgtttaaacctgcaggactagtccctttagtgag

SEQ ID NO: 4958 - protein, 734 aa, Adeno-associated virus
MAADGYLPDWLEDTLSEGIRQWWKLKPGPPPKPAERHKDDSRGLVLPGYKYLGPFNGLDKGEPVNEADAAALEHDKAYDRQLDSGDNPYLKYNHADAEFQERLKEDTSFGGNLGRAVFQAKKRVLEPLGLVEEPVKTAPGKKRPVEHSPVEPDSSSGTGKAGNQPARKRLNFGQTGDADSVPDPQPLGQPPAAPSGLGTNTMATGSGAPMADNNEGADGVGNSSGDWHCDSTWMGDRVITTSTRTWALPTYNNHLYKQISSQSGASNDNHYFGYSTPWGYFDFNRFHCHFSPRDWQRLINNNWGFRPKRLNLKLFNIQVKEVTQNDGTTTIANNLTSTVQVFTDLEYQLPYVLGSAHQGCLPPFPADVFMVPQYGYLTLNNGSQAVGRSSFYCLEYFPSQMLRTGNNFTFSYTFEDVPFHSSYAHSQSLDRLMNPLIDQYLYYLSRTNTPSGTTTQSRLQFSQAGASDIRDQSRNWLPGPCYRQQRVSKTAADNNNGEYSWTGATKYHLNGRDSLVNPGPAMASHKDDEEKFFPQSGVLIFGKQGSEKTNVDIEKVMITDEEEIRTTNPVATEQYGSVSTNLQSGNTRAATSDVNTQGVLPGMVWQDRDVYLQGPIWAKIPHTDGHFHPSPLMGGFGLKHPPPQILIKNTPVPANPSTTFSAAKFASFITQYSTGQVSVEIEWELQKENSKRWNPEIQYTSNYNKSVNVDFTVDTNGVYSEPRPIGTRYLTRNL

SEQ ID NO: 4959 - DNA, 2208 bp, Adeno-associated virus
atggctgccgatggttatcttccagattggctcgaggacactctctctgaaggaataagacagtggtggaagctcaaacctggcccaccaccaccaaagcccgcagagcggcataaggacgacagcaggggtcttgtgcttcctgggtacaagtacctcggacccttcaacggactcgacaagggagagccggtcaacgaggcagacgccgcggccctcgagcacgacaaggcctacgaccggcagctcgacagcggagacaacccgtacctcaagtacgaccacgccgacgcggagtttcaggagcgccttaaagaagatacgtcttttgggggcaacctcggacgagcagtcttccaggcaaaaaagagggttcttgaacctctgggcctggttgaggagcctgttaagacggctccgggaaaaaagaggccggtagagcactctcctgtggagccagactcctcctcgggaaccggaaaagcgggcaaccagcctgcaagaaagagattgaatttcggtcagactggagacgcagactccgtacctgacccccagcctctcggacagccaccagcagccccctctggtctgggaactaatacgatggctacaggcagtggcgcaccaatggcagacaataacgatggcgccgacggagtgggtaattcctcgggaaattggcattgcgattccacatggatgggcgacagagtcatcaccaccagcacccgaacctgggctctgcccacctacaacaaccatctgtacaagcagatttccagccaatcaggagccagcaacgacaaccactactttggctacagcaccccttgggggtattttgacttcaacagattccactgccacttttcaccacgtgactggcaaagactcatcaacaacaactggggattccggcccaagagactcaacttcaagctctttaacattcaagtcagagaggtcacgcagaatgatggtacgacgacgattgccaataaccttaccagcacggttcaggtgtttactgactcggagtaccagctcccgtacgtcctcggctcggcgcatcaaggatgcctcccgccgttcccagcagacgtcttcatggtgccacagtatggatacctcaccctgaacaacgggagtcaggcagtaggacgctcttcattttactgcctggagtacttcccttctcagatgctgcgtaccggaaacaactttaccttcagctacacctttgaggatgttcctttccacagcagctacgctcacagccagagtttggaccgtctcatgaatcctctcatcgaccagtacctgtattacttgagcagaacaaacactccaagcggaaccaccacgcagtccaggcttcagttttctcaggccggagcgagtgacattcgggatcagtctaggaactggcttcctggaccctgttaccgccagcagcgagtatcaaagacatctgcggacaacaacaacagtgaatactcgtggattggagctaccaagtaccacctcaatggcagagactctctggtgaatccgggcccggcaatggccagccacaaggacgatgaagaaaagttttttcctcagagcggggttctcatctttggaaaacaaggatcagagaaaacaaatgtggacattgaaaaggtcatgattacagacgaagaggaaatcagaaccaccaatcccgtggccacggagcagtatggttctgtatctaccaacctccagagcggcaacacacaagcatctactgcagatgtcaacacacaaggcgttcttccaggcatggtctggcaggacagagacgtgtacctgcaggggcctatctgggcaaagattccgcacacggacggacattttcacccctctcccctcatgggcggattcggacttaaacaccctcctccacagattctcatcaaaaacaccccggtacctgcgaatccttcgaccaccttcagtgcggcaaagtttgcttccttcatcacacagtattccacggggcgggtcagcgtggagatcgagtgggagctacagaaggagaacagcaaacgctggaatcccgagatccagtacacttccaactacaacaaatctgttaatgtggactttactgtggacactaatggtgtgtattcagagcctcgccccattggcaccagatacctgactcgtaatctgtaa

SEQ ID NO: 4960 - protein, 735 aa, Adeno-associated virus
MAADGYLPDWLEDTLSEGIRQWWKLKPGPPPPKPAERHKDDSRGLVLPGYKYLGPFNGLDKGEPVNEADAAALEHDKAYDRQLDSGDNPYLKYDHADAEFQERLKEDTSFGGNLGRAVFQAKKRVLEPLGLVEEPVKTAPGKKRPVEHSPVEPDSSSGTGKAGNQPARKRLNFGQTGDADSVPDPQPLGQPPAAPSGLGTNTMATGSGAPMADNNDGADGVGNSSGNWHCDSTWMGDRVITTSTRTWALPTYNNHLYKQISSQSGASNDNHYFGYSTPWGYFDFNRFHCHFSPRDWQRLINNNWGFRPKRLNFKLFNIQVREVTQNDGTTTIANNLTSTVQVFTDSEYQLPYVLGSAHQGCLPPFPADVFMVPQYGYLTLNNGSQAVGRSSFYCLEYFPSQMLRTGNNFTFSYTFEDVPFHSSYAHSQSLDRLMNPLIDQYLYYLSRTNTPSGTTTQSRLQFSQAGASDIRDQSRNWLPGPCYRQQRVSKTSADNNNSEYSWIGATKYHLNGRDSLVNPGPAMASHKDDEEKFFPQSGVLIFGKQGSEKTNVDIEKVMITDEEEIRTTNPVATEQYGSVSTNLQSGNTQASTADVNTQGVLPGMVWQDRDVYLQGPIWAKIPHTDGHFHPSPLMGGFGLKHPPPQILIKNTPVPANPSTTFSAAKFASFITQYSTGRVSVEIEWELQKENSKRWNPEIQYTSNYNKSVNVDFTVDTNGVYSEPRPIGTRYLTRNL

SEQ ID NO: 4961 - DNA, 2217 bp, Adeno-associated virus
atggctgccgatggttatcttccagattggctcgaggacaacctctctgagggcattcgcgagtggtgggacttgaaacctggagccccgaaacccaaagccaaccagcaaaagcaggacgacggccggggtctggtgcttcctggctacaagtacctcggacccttcaacggactcgacaagggggagcccgtcaacgcggcggacgcagcggccctcgagcacgacaaggcctacgaccagcagctcaaagcgggtgacaatccgtacctgcggtataaccacgccgacgccgagtttcaggagcgtctgcaagaagatacgtcttttgggggcaacctcgggcgagcagtcttccaggccaagaagcgggttctcgaacctctcggtctggttgaggaaggcgctaagacggctcctggaaagaagagaccggtagagccatcaccccagcgttctccagactcctctacgggcatcggcaagacaggccagcagcccgcgaaaaagagactcaactttgggcagactggcgactcagagtcagtgcccgaccctcaaccaatcggagaaccccccgcaggcccctctggtctgggatctggtacaatggctgcaggcggtggcgctccaatggcagacaataacgaaggcgccgacggagtgggtagttcctcaggaaattggcattgcgattccgcatggctgggcgacagagtcatcaccaccagcacccgaccctgggccctccccacctacaacaaccacctctacaagcaaatctccaacgggacatcgggaggaagcaccaacgacaacacctacttcggctacagcaccccctgggggtattttgactttaacagattccactgccacttctcaccacgtgactggcagcgactcatcaacaacaactggggattccggcccaagagactcaacttcaagctcttcaacatccaggtcaaggaggtcacgcagaatgaaggcaccaagaccatcgccaataaccttaccagcacgattcaggtctttacggactcggaataccagctcccgtacgtcctcggctctgcgcaccagggctgcccgcctccgttcccggcggacgtcttcatgattcctcagtacgggtacctgactctgaacaacggcagtcaggccgtgggccgttcctccttctactgcctggagtactttccttctcaaatgcggagaacgggcaacaactttgagttcagctaccagtttgaggacgtgccttttcacagcagctacgcgcatagccaaagcctggaccggctgatgaaccccctcatcgaccagtacctgtactacctgtctcggactcagtccacgggaggtaccgcaggaactcagcagttgctattttctcaggccgggcctaataacatgtcggctcaggccaaaaactggctacccgggccctgctaccggcagcaacgcgtctccacgacactgtcgcaaaataacaacagcaactttgcttggaccggtgccaccaagtatcatctgaatggcagagactctctggtaaatcccggtgtcgctatggcaacgcacaaggacgacgaagagcgattttttccatccagcggagtcttgatgtttgggaaacagggagctggaaaagacaacgtggactatagcagcgttatgctaaccagtgaggaagaaatcaaaaccaccaacccagtggccacagaacagtacggcgtggtggccgataacctgcaacagcaaaacgccgctcctattgtaggggccgtcaacagtcaaggagccttacctggcatggtctggcagaaccgggacgtgtacctgcagggtcctatctgggccaagattcctcacacggacggcaactttcatccttcgccgctgatgggaggctttggactgaaacacccgcctcctcagatcctgattaagaatacacctgttcccgcggatcctccaactaccttcagtcaagccaagctggcgtcgttcatcacgcagtacagcaccggacaggtcagcgtggaaattgaatgggagctgcagaaagagaacagcaagcgctggaacccagagattcagtatacttccaactactacaaatctacaaatgtggactttgctgtcaatactgagggtacttattcagagcctcgccccattggcacccgttacctcacccgtaacctgtaa

SEQ ID NO: 4962 - protein, 738 aa, Adeno-associated virus
MAADGYLPDWLEDNLSEGIREWWDLKPGAPKPKANQQKQDDGRGLVLPGYKYLGPFNGLDKGEPVNAADAAALEHDKAYDQQLKAGDNPYLRYNHADAEFQERLQEDTSFGGNLGRAVFQAKKRVLEPLGLVEEGAKTAPGKKRPVEPSPQRSPDSSTGIGKTGQQPAKKRLNFGQTGDSESVPDPQPIGEPPAGPSGLGSGTMAAGGGAPMADNNEGADGVGSSSGNWHCDSAWLGDRVITTSTRPWALPTYNNHLYKQISNGTSGGSTNDNTYFGYSTPWGYFDFNRFHCHFSPRDWQRLINNNWGFRPKRLNFKLFNIQVKEVTQNEGTKTIANNLTSTIQVFTDSEYQLPYVLGSAHQGCPPPFPADVFMIPQYGYLTLNNGSQAVGRSSFYCLEYFPSQMRRTGNNFEFSYQFEDVPFHSSYAHSQSLDRLMNPLIDQYLYYLSRTQSTGGTAGTQQLLFSQAGPNNMSAQAKNWLPGPCYRQQRVSTTLSQNNNSNFAWTGATKYHLNGRDSLVNPGVAMATHKDDEERFFPSSGVLMFGKQGAGKDNVDYSSVMLTSEEEIKTTNPVATEQYGVVADNLQQQNAAPIVGAVNSQGALPGMVWQNRDVYLQGPIWAKIPHTDGNFHPSPLMGGFGLKHPPPQILIKNTPVPADPPTTFSQAKLASFITQYSTGQVSVEIEWELQKENSKRWNPEIQYTSNYYKSTNVDFAVNTEGTYSEPRPIGTRYLTRNL

SEQ ID NO: 4963 - protein, 735 aa, Adeno-associated virus
MAADGYLPDWLEDTLSEGIRQWWKLKPGPPPPKPAERHKDDSRGLVLPGYKYLGPFNGLDKGEPVNEADAAALEHDKAYDRQLDSGDNPYLKYNHADAEFQERLKEDTSFGGNLGRAVFQAKKRVLEPLGLVEEPVKTAPGKKRPVEHSPVEPDSSSGTGKAGQQPARKRLNFGQTGDADSVPDPQPLGQPPAAPSGLGSTTMATGSGAPMADNNEGADGVGNSSGNWHCDSQWLGDRVITTSTRTWALPTYNNHLYKQISSQSGASNDNHYFGYSTPWGYFDFNRFHCHFSPRDWQRLINNNWGFRPKRLNFKLFNIQVKEVTQNDGTTTIANNLTSTVQVFTDSEYQLPYVLGSAHQGCLPPFPADVFMVPQYGYLTLNNGSQAVGRSSFYCLEYFPSQMLRTGNNFQFSYTFEDVPFHSSYAHSQSLDRLMNPLVDQYLYYLNKTQTNSGTLQQSRLLFSQAGPTNMSLQAKNWLPGPCYRQQRLSKQANDNNNSNFPWTAATKYHLNGRDSLVNPGPAMASHKDDEEKFFPMHGTLIFGKQGTNANDADLENVMITDEEEIRTTNPVATEQYGTVSNNLQNSNTGPTTGTVNHQGALPGMVWQDRDVYLQGPIWAKIPHTDGHFHPSPLMGGFGLKHPPPQIMIKNTPVPANPPTNFSSAKFASFITQYSTGQVSVEIEWELQKENSKRWNPEIQYTSNYNKSVNVDFTVDTNGVYSEPRPIGTRYLTRNL

SEQ ID NO: 4964 - DNA, 3158 bp, Adeno-associated virus
gattgaatttagcggccgcgaattcgcccttgctgcgtcaactggaccaatgagaactttcctttcaatgattgcgtcgacaagatggtgatctggtgggaggagggaaagatgaccgccaaggtcgtggagtcggccaaagccattctcggaggaagcaaggtgcgcgcggaccagaaatgcaagtcctcggcccagatagacccgactcccgtgattgtcacctccaacaccaacatgtgcgccgtgattgacgggaactcaacgaccttcgaacaccagcagccgttgcaagaccggatgttcaaatttgaactcacccgccgtctggatcatgactttgggaaggtcaccaagcaggaagtcaaagactttttccggtgggcaaaggatcacgtggttgaggtggagcatgaattctacgtcaaaaagggtggagctaagaaaagacccgcccccagtgacgcagatataagtgagcccaaacgggcgcgcgagtcagttgcgcagccatcgacgtcagacgcggaagcttcgatcaactacgcgggcaggtaccaaaacaaatgttctcgtcacgtgggcatgaatctgatgctgtttccctgcagacaatgcgagagaatgaatcagaattcaaatatctgcttcactcacggacagaaagactgtttagagtgctttcccgtgtcagaatctcaacccgtttctgtcgtcaaaaaggcgtatcagaaactttgctacattcatcatatcatgggaaaggtgccagacgcttgcactgcctgcgatctggtcaatgtggatttggatgactgcatctctgaacaataaatgatttaaatcaggtatggctgccgatggttatcttccagattggctcgaggacactctctctgaaggaataagacagtggtggaagctcaaacctggcccaccaccaccaaagcccgcagagcggcataaggacgacagcaggggtcttgtgcttcctgggtacaagtacctcggacccttcaacggactcgacaagggggagccggtcaacgaggcagacgccgcggccctcgagcacgacaaggcctacgaccggcagctcgacagcggagacaacccgtacctcaagtacaaccacgccgacgcggagtttcaggagcgccttaaagaagatacgtcttttgggggcaacctcggacgagcagtcttccaggcaaaaaagagggttcttgaacctctgggcctggttgaggaacctgttaaaacggctccgggaaaaaagaggccggtagagcactctcctgtggagccagactcctcctcgggaaccggaaaagcgggccagcagcctgcaagaaaaagattgaatttcggtcagactggagacgcagactccgtacctgacccccagcctctcggacagccaccagcagccccctctggtctgggatctactacaatggctacaggcagtggcgcaccaatggcagacaataacgagggtgccgatggagtgggtaattcctcgggaaattggcattgcgattcccaatggctgggcgacagagtcatcaccaccagcacccgcacctgggccctgcccacctacaacaaccacctctacaagcaaatctccagccaatcaggagcctcaaacgacaaccactactttggctacagcaccccctgggggtattttgacttcaacagattccactgccacttttcaccacgtgactggcaaagactcatcaacaacaactggggattccgacccaagagactcaacttcaagctctttaacattcaagtcaaagaggtcacgcagaatgacggtacgacgacgattgccaataaccttaccagcacggttcaggtgtttactgactcggagtaccagctcccgtacgtcctcggctcggcgcatcaaggatgcctcccgccgtttccagcggacgtcttcatggtcccacagtatggatacctcaccctgaacaacgggagtcaggcagtaggacgctcttcattttactgcctggagtactttccttctcagatgctgcgtaccggaaacaactttcaattcagctacacttttgaagacgtgcctttccacagcagctacgctcacagccagagtctggatcggctgatgaatcctctggtcgaccagtacctgtattatctgaacaagacacaaacaaatagtggaactcttcagcagtctcggctactgtttagccaagctggacccaccaacatgtctcttcaagctaaaaactggctgcctggaccttgctacagacagcagcgtctgtcaaagcaggcaaacgacaacaacaacagcaactttccctggactgcagctacaaagtatcatctaaatggccgggactcgttggttaatccaggaccagctatggccagtcacaaggatgacgaagaaaagtttttccccatgcatggaacccttatatttggtaaacaaggaacaaatgccaacgacgcggatttggaaaatgtcatgattacagatgaagaagaaatcaggaccaccaatcccgtggctacggagcagtacggaactgtatcaaataatttgcaaaactcaaacactggtccaactactggaactgtcaatcaccaaggagcgttacctggtatggtgtggcaggatcgagacgtgtacctgcagggacccatttgggccaagattcctcacaccgatggacactttcatccttctccactgatgggaggttttggactcaaacacccacctcctcaaatcatgatcaaaaacactcccgttccagccaatcctcccacaaacttcagttctgccaagtttgcttctttcatcacacagtattccacggggcaggtcagcgtggagatcgagtgggagctgcagaaggagaacagcaaacgctggaatcccgaaattcagtacacttccaactacaacaaatctgttaatgtggactttactgtggacactaatggtgtgtattcagagcctcgccccattggcaccagatacctgactcgtaatctgtaattgcttgttaatcaataaaccgtttaattcgtttcagttgaactttggtctctgcgaagggcgaattcgtttaaacctgcaggactagtccctttagtga

SEQ ID NO: 4965 - protein, 735 aa, Adeno-associated virus
MAADGYLPDWLEDTLSEGIRQWWKLKPGPPPPKPAERHKDDSRGLVLPGYKYLGPFNGLDKGEPVNEADAAALEHDKAYDRQLDSGDNPYLKYNHADAEFQERLKEDTSFGGNLGRAVFQAKKRVLEPLGLVEEPVKTAPGKKRPVEHPPVEPDSSSGTGKAGQQPARKRLNFGQTGDADSVPDPQPLGQPPAAPSGLGSTTMATGSGAPMADNNEGADGVGNSSGNWHCDSQWLGDRVITTSTRTWALPTYNNHLYKQISSQSGASNDNHYFGYSTPWGYFDFNRFHCHFSPRDWQRLINNNWGFRPKRLNFKLFNIQVKEVTQNDGTTTIANNLTSTVQVFTDSEYQLPYVLGSAHQGCLPPFPADVFMVPQYGYLTLNNGSQAVGRSSFYCLEYFPSQMLRTGNNFQFSYTFEDVPFHSSYAHSQSLDRLMNPLIDQYLYYLNKTQTNSGTLQQSRLLFSQAGPTNMSLQAKNRLPGPCYRQQRLSKQANDNNNSNFPWTAATKYHLNGRDSLVNPGPAMASHKDDEEKFFPMHGTLIFGKQGTNANDADLENVMITDEEEIRTTNPVATEQYGTVSNNLQNSNTGPTTGTVNHQGALPGMVWQDRDVYLQGPIWAKIPHTDGHFHPSPLVGGFGLKHPPPQIMIKNTPVPANPPTNFSSAKFASFITQYSTGQVSVEIEWELQKENSKRWNPEIQYTSNYNKSVNVDFTVDTNGVYSEPRPIGTRYLTRNL

SEQ ID NO: 4966 - DNA, 3159 bp, Adeno-associated virus
gattgaatttagcggccgcgaattcgcccttgctgcgtcaactggaccaatgagaactttcctttcaatgattgcgtcgacaagatggtgatctggtgggaggagggaaagatgaccgccaaggtcgtggagtcggccaaagccattctcggaggaagcaaggtgcgcgtggaccagaaatgcaagtcctcggcccagatagacccgactcccgtgattgtcacctccaacaccgacatgtgcgccgtgattgacgggaactcaacgaccttcgaacaccagcagccgttgcaagaccggatgttcaaatttgaactcacccgccgtctggatcatgactttgggaaggtcaccaagcaggaagtcaaagactttttccggtgggcaaaggatcacgtggttgaggtggagcatgaattctacgtcaaaaagggtggagctaagaaaagacccgcccccagtgacgcagatataagtgagcccaaacgggcgcgcgagtcagttgcgcagccatcgacgtcagacgcggaagcttcgatcaactacgcggacaggtaccaaaacaaatgttctcgtcacgtgggcatgaatctgatgctgtttccctgcagacaatgcgagagaatgaatcagaattcaaatatctgcttcactcacggacagaaagactgtttagagtgctttcccgtgtcagaatctcaacccgtttctgtcgtcaaaaaggcgtatcagaaactttgctacattcatcatatcatgggaaaggtgccagacgcttgcactgcctgcgatctggtcaatgtggatttggatgactgcatctctgaacaataaatgatttaaatcaggtatggctgccgatggttatcttccagattggctcgaggacactctctctgaaggaataagacagtggtggaagctcaaacctggcccaccaccaccaaagcccgcagagcggcataaggacgacagcaggggtcttgtgcttcctgggtacaagtacctcggacccttcaacggactcgacaagggggagccggtcaacgaggcagacgccgcggccctcgagcacgacaaggcctacgaccggcagctcgacagcggagacaacccgtacctcaagtacaaccacgccgacgcggagtttcaggagcgccttaaagaagatacgtcttttgggggcaacctcggacgagcagtcttccaggcaaaaaagagggttcttgaacctctgggcctggttgaggaacctgttaaaacggctccgggaaaaaagaggccggtagagcaccctcctgtggagccagactcctcctcgggaaccggaaaagcgggccagcagcctgcaagaaaaagattgaatttcggtcagactggagacgcagactccgtacctgacccccagcctctcggacagccaccagcagccccctctggtctgggatctactacaatggctacaggcagtggcgcaccaatggcagacaataacgagggtgccgatggagtgggtaattcctcgggaaattggcattgcgattcccaatggctgggcgacagagtcatcaccaccagcacccgcacctgggccctgcccacctacaacaaccacctctacaagcaaatctccagccaatcaggagcctcaaacgacaaccactactttggctacagcaccccctgggggtattttgacttcaacagattccactgccacttttcaccacgtgactggcaaagactcatcaacaacaactggggattccgacccaagagactcaacttcaagctctttaacattcaagtcaaagaggtcacgcagaatgacggtacgacgacgattgccaataaccttaccagcacggttcaggtgtttactgactcggagtaccagctcccgtacgtcctcggctcggcgcatcaaggatgcctcccgccgtttccagcggacgtcttcatggtcccacagtatggatacctcaccctgaacaacgggagtcaggcagtaggacgctcttcattttactgcctggagtactttccttctcagatgctgcgtaccggaaacaactttcagttcagctacacttttgaagacgtgcctttccacagcagctacgctcacagccagagtctggatcggctgatgaatcctctgatcgaccagtacctgtattatctgaacaagacacaaacaaatagtggaactcttcagcagtctcggctactgtttagccaagctggacccaccaacatgtctcttcaagctaaaaaccggctgcctggaccttgctacagacagcagcgtctgtcaaagcaggcaaacgacaacaacaacagcaactttccctggaccgcagctacaaagtatcatctaaatggccgggactcgttggttaatccaggaccagctatggccagtcacaaggatgacgaagaaaagtttttccccatgcatggaacccttatatttggtaaacaaggaacaaatgccaacgacgcggatttggaaaatgtcatgattacagatgaagaagaaatcaggaccaccaatcccgtggctacggagcagtacggaactgtatcaaataatttgcaaaactcaaacactggtccaactactggaactgtcaatcaccaaggagcgttacctggtatggtgtggcaggatcgagacgtgtacctgcagggacccatttgggccaagattcctcacaccgatggacactttcatccttctccactggtgggaggttttggactcaaacacccacctcctcaaatcatgatcaaaaacactcccgttccagccaatcctcccacaaacttcagttctgccaagtttgcttctttcatcacacagtattccacggggcaggtcagcgtggagatcgagtgggagctgcagaaggagaacagcaaacgctggaatcccgaaattcagtacacttccaactacaacaaatctgttaatgtggactttactgtggacactaatggtgtgtattcagagcctcgccccattggcaccagatacctgactcgtaatctgtaattgcttgttaatcaataaaccgtttaattcgtttcagttgaactttggtctctgcgaagggcgaattcgtttaaacctgcaggactagtccctttagtgag

SEQ ID NO: 4967 - DNA, 2208 bp, Adeno-associated virus
atggctgccgatggttatcttccagattggctcgaggacactctctctgaaggaataagacagtggtggaagctcaaacctggcccaccaccaccaaagcccgcagagcggcataaggacgacagcaggggtcttgtgcttcctgggtacaagtaccttggacccttcaacggactcgacaagggagagccggtcaacgaggcagacgccgcggccctcgagcacgacaaggcctacgaccggcagctcgacagcggagacaacccgtaccccaagtacaaccacgccgacgcggagttccaggagcgtcttaaagaagatacgtcttttgggggcaacctcggacgagcagtcttccaggcgaaaaagagggttcttgaacctctgggcctggttgaggaacctgttaagacggctccgggaaaaaagaggccggtagagcactctcctgcggagccagactcctcctcgggaaccggaaaagcgggccagcagcctgcaagaaagagattgaatttcggtcagactggagacgcagactccgtacctgacccccagcctctcggacagccaccagcagccccctctggtctgggaactaatacgatggctacaggcagtggcgcaccaatggcagacaataacgagggcgccgacggagtgggtaattcctcgggaaattggcattgcgattccacatggatgggcgacagagtcatcaccaccagcacccgcacctgggctctgcccacctacaacaaccacctctacaagcagatttccagccaatcaggagcctcaaacgacaaccactactttggctacagcaccccttgggggtattttgacttcaacagattccactgccacttttcgccacgtgactggcaaagactcatcaacaacaattggggattccggcccaaaagactcaacttcaagctctttaacattcaagtcaaggaggtcacgcagaatgacggtacgacgacgattgccaataaccttaccagcacggttcaggtgtttactgactcggagtaccagctcccgtacgtcctcggctcggcgcatcaaggatgcctcccgccgttcccagcagacgtcttcatggtgccacagtatggatacctcaccctgaacaacgggagtcaggcagtaggacgctcttcattttactgcctggagtactttccttctcagatgctgcgtaccggaaacaactttaccttcagctacacctttgaggacgttcctttccacagcagctacgcccacagccagagtttggaccgtctcatgaatcctctcatcgaccagtacctgtattacttgagcagaacaaacactccaagcggaaccaccacgcagtcaaggcttcagttttctcaggccggagcaagtgacattcgggaccagtctaggaactggcttcctggaccctgttaccgccagcagcgagtatcaaagacatctgcggataacaacaacagtgaatactcgtggactggagctaccaagtaccaccttaatggaagagactctctggtgaatccgggcccggccatggccagccacaaggacgatgaagaaaagttttttcctcagagcggggttctcatctttggaaaacaagactcgggaaaaactaatgtggacattgaaaaggtcatgattacagacgaagaggaaatcaggaccaccaatcccgtggctacggagcagtatggttctgtatctaccaacctccagagcggcaacacacaagcagctacctcagatgtcaacacacaaggcgttcttccaggcatggtgtggcaggacagagacgtgtacctgcaggggcccatctgggcaaagattccacacacggacggacattttcacccctctcccctcatgggcggattcggacttaaacaccctcccccgcagattctcatcaagaacaccccggtacctgcgaatccttcgactaccttcagtgcggcaaagtttgcttccttcattacacagtactccacggggcaggtcagcgtggagatcgagtgggagctgcagaaggagaacagcaaacgctggaatcccgagattcagtacacttccaactacaacaaatctgttaatgtggactttactgtggacactaatggtgtgtattcagagcctcgccccattggcaccaggtacctgactcgtaatctgtaa

SEQ ID NO: 4968 - protein, 735 aa, Adeno-associated virus
MAADGYLPDWLEDTLSEGIRQWWKLKPGPPPPKPAERHKDDSRGLVLPGYKYLGPFNGLDKGEPVNEADAAALEHDKAYDRQLDSGDNPYPKYNHADAEFQERLKEDTSFGGNLGRAVFQAKKRVLEPLGLVEEPVKTAPGKKRPVEHSPAEPDSSSGTGKAGQQPARKRLNFGQTGDADSVPDPQPLGQPPAAPSGLGTNTMATGSGAPMADNNEGADGVGNSSGNWHCDSTWMGDRVITTSTRTWALPTYNNHLYKQISSQSGASNDNHYFGYSTPWGYFDFNRFHCHFSPRDWQRLINNNWGFRPKRLNFKLFNIQVKEVTQNDGTTTIANNLTSTVQVFTDSEYQLPYVLGSAHQGCLPPFPADVFMVPQYGYLTLNNGSQAVGRSSFYCLEYFPSQMLRTGNNFTFSYTFEDVPFHSSYAHSQSLDRLMNPLIDQYLYYLSRTNTPSGTTTQSRLQFSQAGASDIRDQSRNWLPGPCYRQQRVSKTSADNNNSEYSWTGATKYHLNGRDSLVNPGPAMASHKDDEEKFFPQSGVLIFGKQDSGKTNVDIEKVMITDEEEIRTTNPVATEQYGSVSTNLQSGNTQAATSDVNTQGVLPGMVWQDRDVYLQGPIWAKIPHTDGHFHPSPLMGGFGLKHPPPQILIKNTPVPANPSTTFSAAKFASFITQYSTGQVSVEIEWELQKENSKRWNPEIQYTSNYNKSVNVDFTVDTNGVYSEPRPIGTRYLTRNL

SEQ ID NO: 4969 - DNA, 2208 bp, Adeno-associated virus
atggctgccgatggttatcttccagattggctcgaggacactctctctgaaggaataagacagtggtggaagctcaaacctggcccaccaccaccaaagcccgcagagcggcataaggacgacagcaggggtcttgtgcttcctgggtacaagtaccttggacccttcaacggactcgacaagggagagccggtcaacgaggcagacgccgcggccctcgagcacgacaaggcctacgaccggcagctcgacggcggagacaacccgtacctcaagtacaaccacgccgacgcggagttccaggagcgtcttaaagaagatacgtcttttgggggcaacctcggacgagcagtcttccaggcgaaaaagagggttcttgaacctctgggcctggttgaggaacctgttaagacggctccgggaaaaaagaggccggtagagcactctcttgcggagccagactcctcctcgggaaccggaaaagcgggccagcagcctgcaagaaggagattgaatttcggtcagactggagacgcagactccgtacctgacccccagcctctcggacagccaccagcagccccctctggtctgggaactaatacgatggctacaggcagtggcgcaccaatggcagacaataacgagggcgccgacggagtgggtaattcctcgggaaattggcattgcgattccacatggatgggcgacagagtcatcaccaccagcacccgcacctgggctctgcccacctacaacaaccacctctacaggcagatttccagccaatcaggagcctcaaacgacaaccactactttggctacagcaccccttgggggtattttgacttcaacagattccactgccacttttcgccacgtgactggcaaagactcatcaacaacaattggggatcccggcccaaaagactcaacttcaagctctttaacattcaagtcaaggaggtcacgcagaatgacggtacgacgacgattgccaataaccttaccagcacggttcaggtgtttactgactcggagtaccagctcccgtacgtcctcggctcggcgcatcaaggatgcctcccgccgttcccagcagacgtcttcatggtgccacagtatggatacctcaccctgaacaacgggagtcaggcagtaggacgctcttcattttactgcctggagtactttccttctcagatgctgcgtaccggaaacaactttaccttcagctacacctttgaggacgttcctttccacagcagctacgcccacagccagagtttggaccgtctcatgaatcctctcgtcgaccagtacctgtattacttgagcagaacaaacactccaagcggaaccaccacgcagtcaaggcttcagttttctcaggccggagcaagtgacattcgggaccagtctaggaactggcttcctggaccctgttaccgccagcagcgagtatcaaagacatctgcggataacaacaacagtgaatactcgtggactggagctaccaagtaccaccttaatggaagagactctctggtgaatccgggcccggccatggccagccacaaggacgatgaagaaaagttttttcctcagagcggggttctcatctttggaaaacaagactcgggaaaaactaatgtggacattgaaaaggtcatgattacagacgaagaggaaatcaggaccaccaatcccgtggctacggagcagtatggttctgtatctaccaacctccagagcggcaacacacaagcagctacctcagatgtcaacacacaaggcgttcttccaggcatggtgtggcaggacagagacgtgtacctgcaggggcccatctgggcaaagattccacacacggacggacattttcacccctctcccctcatgggcggattcggacttaaacaccctcccccgcagattctcatcaagaacaccccggtacctgcgaatccttcgactaccttcagtgcggcaaagtttgcttccttcattacacagtactccacggggcaggtcagcgtggagatcgagtgggagctgcagaaggagaacagcaaacgctggaatcccgagattcagtacacttccaactacaacaaatctgttaatgtggactttactgtggacactaatggtgtgtattcagagcctcgccccattggcaccagatacctgactcgtaatctgtaa

SEQ ID NO: 4970 - protein, 735 aa, Adeno-associated virus
MAADGYLPDWLEDTLSEGIRQWWKLKPGPPPPKPAERHKDDSRGLVLPGYKYLGPFNGLDKGEPVNEADAAALEHDKAYDRQLDGGDNPYLKYNHADAEFQERLKEDTSFGGNLGRAVFQAKKRVLEPLGLVEEPVKTAPGKKRPVEHSLAEPDSSSGTGKAGQQPARRRLNFGQTGDADSVPDPQPLGQPPAAPSGLGTNTMATGSGAPMADNNEGADGVGNSSGNWHCDSTWMGDRVITTSTRTWALPTYNNHLYRQISSQSGASNDNHYFGYSTPWGYFDFNRFHCHFSPRDWQRLINNNWGSRPKRLNFKLFNIQVKEVTQNDGTTTIANNLTSTVQVFTDSEYQLPYVLGSAHQGCLPPFPADVFMVPQYGYLTLNNGSQAVGRSSFYCLEYFPSQMLRTGNNFTFSYTFEDVPFHSSYAHSQSLDRLMNPLVDQYLYYLSRTNTPSGTTTQSRLQFSQAGASDIRDQSRNWLPGPCYRQQRVSKTSADNNNSEYSWTGATKYHLNGRDSLVNPGPAMASHKDDEEKFFPQSGVLIFGKQDSGKTNVDIEKVMITDEEEIRTTNPVATEQYGSVSTNLQSGNTQAATSDVNTQGVLPGMVWQDRDVYLQGPIWAKIPHTDGHFHPSPLMGGFGLKHPPPQILIKNTPVPANPSTTFSAAKFASFITQYSTGQVSVEIEWELQKENSKRWNPEIQYTSNYNKSVNVDFTVDTNGVYSEPRPIGTRYLTRNL

SEQ ID NO: 4971 - protein, 738 aa, Adeno-associated virus
MAADGYLPDWLEDNLSEGIREWWDLKPGAPKPKANQQKQDDGRGLVLPGYKYLGPFNGLDKGEPVNAADAAALEHDKAYDQQLKAGDNPYLRYNHADAEFQERLQEDTSFGGNLGRAVFQAKKRVLEPLGLVEEAAKTAPGKKRPVEPSPQRSPDSSAGIGKKGQQPAKKRLNFGQTGDSESVPDPQPIGEPPAGPSGLGSGTMAAGGGAPMADNNEGADGVGSSSGNWHCDSTWLGDRVITTSTRTWALPTYNNHLYKQISNGTSGGSTNDNTYFGYSTPWGYFDFNRFHCHFSPRDWQRLINNNWGFRPKRLSFKLFNIQVKEVTQNEGTETIANNLTSTIQVFTDSEYQLPYVLGSAHQGCLPPFPADVFMIPQYGYLTLNNGSQAVGRSSFYCLEYFPSQMLRTGNNFEFSYTFEDVPFHSSCAHSQSSDRLMNPLIDQYLYYLSRTRSTGGTQGTQQLLFSQAGPANMSAQAKNWLPGPCYRQQRVSTTLSQNNNSNFAWTGATKYHLNGRDSLVNPGVAMATHKDDEERFFPSSGVLMFGKQGAGRDNVDYSSVMLTSEEEIKTTNPVATEQYGVVADNLQQTNTGPIVGNVNSQGALPGMVWQNRDVYLQGPIWAKIPHTDGNFHPSPLMGGFGLKHPPPQILIKNTPVPADPPTTFSQAKLASFITQYSTGQVSVEIEWELQKENSKRWNPEIQYTSNYYKSTNVDFAVNTEGTYSEPRPIGTRYLTRNL

SEQ ID NO: 4972 - DNA, 2217 bp, Adeno-associated virus
atggctgctgacggttatcttccagattggctcgaggacaacctctctgagggcattcgcgagtggtgggacctgaaacctggagcccccaagcccaaggccaaccagcagaagcaggacgacggccggggtctggtgcttcttggctacaagtacctcggacccttcaacggactcgacaagggggagcccgtcaatgcggcggacgcagcggccctcgagcacgacaaggcctacgaccagcagctcaaagcgggtgacaatccgtacctgcggtataaccacgccgacgccgagtttcaggagcgtctgcaagaagatacgtcttttgggggcaacctcgggcgagcagtcttccaggccaagaagcgggttctcgaacctctcggtctggttgaggaagctgctaagacggctcctggaaagaagagaccggtagaaccgtcacctcagcgttcccccgactcctccacgggcatcggcaagaaaggccagcagcccgctaaaaagagactgaactttggtcagactggcgactcagagtcagtccccgaccctcaaccaatcggagaaccaccagcaggcccctctggtctgggatctggtacaatggctgcaggcggtggcgctccaatggcagacaataacgaaggcgccgacggagtgggtagttcctcaggaaattggcattgcgattccacatggctgggcgacagagtcatcaccaccagcacccgaacctgggccctgcccacctacaacaaccacctctacaagcaaatatccaatgggacatcgggaggaagcaccaacgacaacacctacttcggctacagcaccccctgggggtattttgacttcaacagattccactgccacttctcaccacgtgactggcagcgactcatcaacaacaactggggattccggccaaaaagactcagcttcaagctcttcaacatccaggtcaaggaggtcacgcagaatgaaggcaccaagaccatcgccaataaccttaccagcacgattcaggtatttacggactcggaataccagctgccgtacgtcctcggctccgcgcaccagggctgcctgcctccgttcccggcggacgtcttcatgattccccagtacggctaccttacactgaacaatggaagtcaagccgtaggccgttcctccttctactgcctggaatattttccatctcaaatgctgcgaactggaaacaattttgaattcagctacaccttcgaggacgtgcctttccacagcggctacgcacacagccagagcttggaccgactgatgaatcctctcatcgaccagtacctgtactacttatccagaactcagtccacaggaggaactcaaggtacccagcaattgttattttctcaagctgggcctgcaaacatgtcggctcaggctaagaactggctacctggaccttgctaccggcagcagcgagtctctacgacactgtcgcaaaacaacaacagcaactttgcttggactggtgccaccaaatatcacctgaacggaagagactctttggtaaatcccggtgtcgccatggcaacccacaaggacgacgaggaacgcttcttcccgtcgagtggagtcctgatgtttggaaaacagggtgctggaagagacaatgtggactacagcagcgttatgctaaccagcgaagaagaaattaaaaccactaaccctgtagccacagaacaatacggtgtggtggctgacaacttgcagcaaaccaatacagggcctattgtgggaaatgtcaacagccaaggagccttacctggcatggtctggcagaaccgagacgtgtacctgcagggtcccatctgggccaagattcctcacacggacggcaacttccacccttcaccgctaatgggaggatttggactgaagcacccacctcctcagatcctgatcaagaacacgccggtacctgcggatcctccaacgacgttcagccaggcgaaattggcttccttcattacgcagtacagcaccggacaggtcagcgtggaaatcgagtgggagctgcagaaggagaacagcaaacgctggaacccagagattcagtacacttcaaactactacaaatctacaaatgtggactttgctgtcaatacagagggaacttattctgagcctcgccccattggtactcgttacctcacccgtaatctgtaa

SEQ ID NO: 4973 - protein, 738 aa, Adeno-associated virus
MAADGYLPDWLEDNLSEGIREWWDLKPGAPKPKANQQKQDDGRGLVLLGYKYLGPFNGLDKGEPVNAADAAALEHDKAYDQQLKAGDNPYLRYNHADAEFQERLQEDTSFGGNLGRAVFQAKKRVLEPLGLVEEAAKTAPGKKRPVEPSPQRSPDSSTGIGKKGQQPAKKRLNFGQTGDSESVPDPQPIGEPPAGPSGLGSGTMAAGGGAPMADNNEGADGVGSSSGNWHCDSTWLGDRVITTSTRTWALPTYNNHLYKQISNGTSGGSTNDNTYFGYSTPWGYFDFNRFHCHFSPRDWQRLINNNWGFRPKRLSFKLFNIQVKEVTQNEGTKTIANNLTSTIQVFTDSEYQLPYVLGSAHQGCLPPFPADVFMIPQYGYLTLNNGSQAVGRSSFYCLEYFPSQMLRTGNNFEFSYTFEDVPFHSGYAHSQSLDRLMNPLIDQYLYYLSRTQSTGGTQGTQQLLFSQAGPANMSAQAKNWLPGPCYRQQRVSTTLSQNNNSNFAWTGATKYHLNGRDSLVNPGVAMATHKDDEERFFPSSGVLMFGKQGAGRDNVDYSSVMLTSEEEIKTTNPVATEQYGVVADNLQQTNTGPIVGNVNSQGALPGMVWQNRDVYLQGPIWAKIPHTDGNFHPSPLMGGFGLKHPPPQILIKNTPVPADPPTTFSQAKLASFITQYSTGQVSVEIEWELQKENSKRWNPEIQYTSNYYKSTNVDFAVNTEGTYSEPRPIGTRYLTRNL

SEQ ID NO: 4974 - protein, 735 aa, Adeno-associated virus
MAADGYLPDWLEDTLSEGIRQWWKLKPGPPPPKPAERHKDDSRGLVLPGYKYLGPFNGLDKGEPVNEADAAALEHDKAYDRQLDSGDNPYLKYNHADAEFQERLKEDTSFGGNLGRAVFQAKKRVLEPLGLVEPPVKTAPGKKRPVEHSPAEPDSSSGTGKAGQQPARKRLNFGQTGDADSVPDPQPLGQPPAAPSGLGSTTMATGSGAPMADNNEGADGVGNSSGNWHCDSQWLGDRVITTSTRTWALPTYNNHLYKQISSQSGASNDNHYFGYSTPWGYFDFNRFHCHFSPRDWQRLINNNWGFRPKRLNFKLFNIQVKEVTQNDGTTTIANNLTSTVQVFTDSEYQLPYVLGSAHQGCLPPFPADVFMVPQYGYLTLNNGSQAVGRSSFYCLEYFPSQMLRTGNNFQFSYTFEDVPFHSSYAHSQSLDRLMNPLIDQYLYYLNKTQSNSGTLQQSRLLFSQAGPTSMSLQAKNWLPGPCYRQQRLSKQANDNNNSNFPWTAATKYHLNGRDSLVNPGPAMASHKDDEEKFFPMHGTLIFGKQGTNANDADLDNVMITDEEEIRTTNPVATEQYGYVSNNLQNSNTGPTTGTVNHQGALPGMVWQDRDVYLQGPIWAKIPHTDGHFHPSPLMGGFGLKHPPPQIMIKNTPVPANPPTNFSSAKFASFITQYSTGQVSVEIEWELQKENSKRWNPEIQYTSNYNKSVNVDFTVDTNGVYSEPRPIGTRYLTRNL

SEQ ID NO: 4975 - protein, 735 aa, Adeno-associated virus
MAADGYLPDWLEDTLSEGIRQWWKLKPGPPPPKPAERHKDDSRGLVLPGYKYLGPFNGLDKGEPVNEADAAALEHDKAYDRQLDSGDNPYLKYNHADAEFQERLKEDTSFGGNLGRAVFQAKKRVLEPLGLVEGPVKTAPGKKRPVEHSPAEPDSSSGTGKAGQQPARKRLNFGQTGDADSVPDPQPLGQPPAAPSGLGSTTMATGSGAPMADNNEGADGVGNSSGNWHCDSQWLGDRVITTSTRTWALPTYNNHLYKQISSQSGASNDNHYFGYSTPWGYFDFNRFHCHFSPRDWQRLINNNWGFRPKRLNFKLFNIQVKEVTQNDGTTTIANNLTSTVQVFTDSEYQLPYVLGSAHQGCLPPFPADVFMVPQYGYLTLNNGSQAVGRSSFYCLEYFPSQMLRTGNNFQFSYTFEDVPFHSSYAHSQSLDRLMNPLIDQYLYYLNKTQSNSGTLQQSRLLFSQAGPTSMSLQAKNWLPGPCYRQQRLSKQANDNNNSNFPWTAATKYHLNGRDSLVNPGPAMASHKDDEEKFFPMHGTLIFGKQGTNANDADLDNVMITDEEEIRTTNPVATEQYGYVSNNLQNSNTGPTTGTVNHQGALPGMVWQDRDVYLQGPIWAKIPHTDGHFHPSPLMGGFGLKHPPPQIMIKNTPVPANPPTNFSSAKFASFITQYSTGQVSVEIEWELQKENSKRWNPEIQYTSNYNKSVNVDFTVDTNGVYSEPRPIGTRYLTRNL

SEQ ID NO: 4976 - DNA, 2208 bp, Adeno-associated virus
atggctgccgatggttatcttccagattggctcgaggacactctctctgaaggaataagacagtggtggaagctcaaacctggcccaccaccaccaaagcccgcagagcggcataaggacgacagcaggggtcttgtgcttcctgggtacaagtacctcggacccttcaacggactcgacaagggggagccggtcaacgaggcagacgccgcggccctcgagcacgacaaggcctacgaccggcagctcgacagcggagacaacccgtacctcaagtacaaccacgccgacgcggagtttcaggagcgtcttaaagaagatacgtcttttgggggcaacctcggacgagcagtcttccaggcgaaaaagagggttcttgaacctctgggcctggttgagggacctgttaagacggctccgggaaaaaagaggccggtagagcactctcctgcggagccagactcctcctcgggaaccggaaaagcgggccagcagcctgcaagaaaaagattgaattttggtcagactggagacgcagactccgtacctgacccccagcctctcggacagccaccagcagccccctctggtttgggatctactacaatggctacaggcagtggcgcaccaatggcagacaataacgagggtgccgatggagtgggtaattcctcaggaaattggcattgcgattcccaatggctgggcgacagagtcatcaccaccagcacccgaacctgggccctgcccacctacaacaaccacctctacaagcaaatctcaagccaatcaggagcctcaaacgacaaccactactttggctacagcaccccttgggggtattttgacttcaacagattccactgccacttttcaccacgtgactggcaaagactcatcaacaacaactggggattccgacccaagagactcaacttcaagctctttaacattcaagtcaaagaggtcacgcagaatgacggtacgacgacgattgccaataaccttaccagcacggttcaggtgtttactgactcggagtaccagctcccgtacgtcctcgggtcggcgcatcaaggatgcctcccgccgtttccagcggacgtcttcatggtcccacagtatggatacctcaccctgaacaacgggagtcaggcggtaggacgctcttccttttactgcctggagtactttccttctcagatgcttcgtactggaaacaactttcagttcagctacacctttgaagacgttcctttccacagcagctacgctcacagccagagtctggatcggctgatgaatcctctgatcgaccagtacctgtattatctgaacaaaacacaatcaaatagtggaactcttcagcagtctcggctactgtttagtcaagctggacccaccagcatgtctcttcaagctaaaaactggctacctggaccttgctacagacagcagcgtctgtcaaagcaggcaaacgacaacaacaacagcaactttccctggactgcggctacaaagtatcacctaaatggccgggactcgttggttaatccaggaccagctatggccagtcacaaagacgatgaagaaaagtttttccccatgcatggaaccctgatatttggtaaacaaggaacaaatgctaacgacgcggatttggacaatgtcatgattacagatgaagaagaaatccgcaccaccaatcccgtggctacggagcagtacggatatgtgtcaaataatttgcaaaactcaaatactggtccaactactggaactgtcaatcaccaaggagcgttacctggcatggtgtggcaggatcgagacgtgtacctgcagggacccatttgggccaagattcctcacaccgatggacactttcatccttctccactgatgggaggttttgggctcaaacacccgcctcctcagatcatgatcaaaaacactcccgttccagccaatcctcccacaaacttcagttctgccaagtttgcttctttcatcacacagtattccacggggcaggtcagcgtggagatcgagtgggagctgcagaaagagaacagcaaacgctggaatcccgaaattcagtacacttccaactacaacaaatctgttaatgtggactttactgtggacactaatggcgtgtattcagagcctcgccccattggcaccagatacctgactcgtaatctgtaa

SEQ ID NO: 4977 - DNA, 2211 bp, Adeno-associated virus
atggctgccgatggttatcttccagattggctcgaggacaacctctctgagggcattcgcgagtggtgggacttgaaacctggagccccgaagcccaaagccaaccagcaaaagcaggacgacggccggggtctggtgcttcctggctacaagtacctcggacccttcaacggactcgacaagggggagcccgtcaacgcggcggacgcagcggccctcgagcacgacaaggcctacgaccagcagctcaaagcgggtgacaatccgtacctgcggtataaccacgccgacgccgagtttcaggagcgtctgcaagaagatacgtcttttgggggcaacctcgggcgagcagtcttccaggccaagaagcgggttctcgaacctctcggtctggttgaggaaggcgctaagacggctcctggaaagaaacgtccggtagagcagtcgccacaagagccagactcctcctcgggcatcggcaagacaggccagcagcccgctaaaaagagactcaattttggtcagactggcgactcagagtcagtccccgatccacaacctctcggagaacctccagcaacccccgctgctgtgggacctactacaatggcttcaggcggtggcgcaccaatggcagacaataacgaaggcgccgacggagtgggtaatgcctcaggaaattggcattgcgattccacatggctgggcgacagagtcatcaccaccagcacccgcacctgggccttgcccacctacaataaccacctctacaagcaaatctccagtgcttcaacgggggccagcaacgacaaccactacttcggctacagcaccccctgggggtattttgatttcaacagattccactgccacttttcaccacgtgactggcagcgactcatcaacaacaattggggattccggcccaagagactcaacttcaaactcttcaacatccaagtcaaggaggtcacgacgaatgatggcgtcacaaccatcgctaataaccttaccagcacggttcaagtcttctcggactcggagtaccagcttccgtacgtcctcggctctgcgcaccagggctgcctccctccgttcccggcggacgtgttcatgattccgcaatacggctacctgacgctcaacaatggcagccaagccgtgggacgttcatccttttactgcctggaatatttcccttctcagatgctgagaacgggcaacaactttaccttcagctacacctttgaggaagtgcctttccacagcagctacgcgcacagccagagcctggaccggctgatgaatcctctcatcgaccaatacctgtattacctgaacagaactcaaaatcagtccggaagtgcccaaaacaaggacttgctgtttagccgtgggtctccagctggcatgtctgttcagcccaaaaactggctacctggaccctgttatcggcagcagcgcgtttctaaaacaaaaacagacaacaacaacagcaattttacctggactggtgcttcaaaatataacctcaatgggcgtgaatccatcatcaaccctggcactgctatggcctcacacaaagacgacgaagacaagttctttcccatgagcggtgtcatgatttttggaaaagagagcgccggagcttcaaacactgcattggacaatgtcatgattacagacgaagaggaaattaaagccactaaccctgtggccaccgaaagatttgggaccgtggcagtcaatttccagagcagcagcacagaccctgcgaccggagatgtgcatgctatgggagcattacctggcatggtgtggcaagatagagacgtgtacctgcagggtcccatttgggccaaaattcctcacacagatggacactttcacccgtctcctcttatgggcggctttggactcaagaacccgcctcctcagatcctcatcaaaaacacgcctgttcctgcgaatcctccggcggagttttcagctacaaagtttgcttcattcatcacccaatactccacaggacaagtgagtgtggaaattgaatgggagctgcagaaagaaaacagcaagcgctggaatcccgaagtgcagtacacatccaattatgcaaaatctgccaacgttgattttactgtggacaacaatggactttatactgagcctcgccccattggcacccgttaccttacccgtcccctgtaa

SEQ ID NO: 4978 - DNA, 2208 bp, Adeno-associated virus
atggctgccgatggttatcttccagattggctcgaggacactctctctgaaggaacaagacagtggtggaagctcaaacctggcccaccaccaccaaagcccgcagagcggcataaggacgacagcaggggtcttgtgcttcctgggtacaagtacctcggacccttcaacggactcgacaagggggagccggtcaacgaggcagacgccgcggccctcgagcacgacaaggcctacgaccggcagctcgacagcggagacaacccgtacctcaagtacaaccacgccgacgcggagtttcaggagcgtcttaaagaagatacgtcttttgggggcaacctcggacgagcagtcttccaggcgaaaaagagggttcttgaacctctgggcctggttgaggaacctgttaagacggctccgggaaaaaagaggccggtagagcactctcctgcggagccagactcctcctcgggaaccggaaaagcgggccagcagcctgcaagaaaaagattgaattttggtcagactggagacgcagactccgtacctgacccccagcctctcggacagccaccagcagccccctctggtttgggatctactacaatggctacaggcagtggcgcaccaatggcagacaataacgagggtgccgatggagtgggtaattcctcaggaaattggcattgcgattcccaatggctgggcgacagagtcatcaccaccagcacccgaacctgggccctgcccacctacaacaaccacctctacaagcaaatctcaagccaatcaggagcctcaaacgacaaccactactttggctacagcaccccttgggggtattttgacttcaacagattccactgccacttttcaccacgtgactggcaaagactcatcaacaacaactggggattccgacccaagagactcaacttcaagctctttaacattcaagtcaaagaggtcacgcagaatgacggtacgacgacgattgccaataaccttaccagcacggttcaggtgtttactgactcggagtaccagctcccgtacgtcctcgggtcggcgcatcaaggatgcctcccgccgtttccagcggacgtcttcatggtcccacagtatggatacctcaccctgaacaacgggagtcaggcggtaggacgctcttccttttactgcctggagtactttccttctcagatgcttcgtactggaaacaactttcagttcagctacacctttgaagacgttcctttccacagcagctacgctcacagccagagtctggatcggctgatgaatcctctgatcgaccagtacctgtattatctgaacaaaacacaatcaaatagtggaactcttcagcagtctcggctactgtttagtcaagctggacccaccagcatgtctcttcaagctaaaaactggctacctggaccttgctacagacagcagcgtctgtcaaagcaggcaaacgacaacaacaacagcaactttccctggactgcggctacaaagtaccacctaaatggccgggactcgttggttaatccaggaccagctatggccagtcacaaagacgatgaagaaaagtttttccccatgcatggaaccctgatatttggtaaacaaggaacaaatgctaacgacgcggatttggacaatgtcatgattacagatgaagaagaaatccgcaccaccaatcccgtggctacggagcagtacggatatgtgtcaaataatttgcaaaactcaaatactggtccaactactggaactgtcaatcaccaaggagcgttacctggcatggtgtggcaggatcgagacgtgtacctgcagggacccatttgggccaagattcctcacaccgatggacactttcatccttctccactgatgggaggttttgggctcaaacacccgcctcctcagatcatgatcaaaaacactcccgttccagccaatcctcccacaaacttcagttctgccaagtttgcttctttcatcacacagtattccacggggcaggtcagcgtggagatcgagtgggagctgcagaaagagaacagcaaacgctggaatcccgaaattcagtacacttccaactacaacaaatctgttaatgtggactttactgtggacactaatggcgtgtattcagagcctcgccccattggcaccagatacctgactcgtaatctgtaa

SEQ ID NO: 4979 - DNA, 2217 bp, Adeno-associated virus
atggctgctgacggttatcttccagattggctcgaggacaacctctctgagggcattcgcgagtggtgggacctgaaacctggagcccccaagcccaaggccaaccagcagaagcaggacgacggccggggtctggtgcttcctggctacaagtacctcggacccttcaacggactcgacaagggggagcccgtcaacgcggcggacgcagcggccctcgagcacgacaaggcctacgaccagcagctcaaagcgggtgacaatccgtacctgcggtataaccacgccgacgccgagtttcaggagcgtctgcaagaagatacgtcttttgggggcaacctcgggcgagcagtcttccaggccaagaagcgggttctcgaacctctcggtctggttgaggaagctgctaagacggctcctggaaagaagagaccggtagaaccgtcacctcagcgttcccccgactcctccacgggcatcggcaagaaaggccagcagcccgctaaaaagagactgaactttggtcagactggcgactcagagtcagtccccgaccctcaaccaatcggagaaccacctgcaggcccctctggtctgggatctggtacaatggctgcaggcggtggcgctccaatggcagacaataacgaaggcgccgacggagtgggtagttcctcaggaaattggcattgcgattccacatggctgggcgacagagtcatcaccaccagcacccgaacctgggccctgcccacctacaacaaccacctctacaagcaaatatccaatgggacatcgggagggagcaccaacgacaacacctacttcggctacagcaccccctgggggtattttgacttcaacagattccactgccacttctcaccacgtgactggcagcgactcatcaacaacaactggggattccggccaaaaagactcagcttcaagctcttcaacatccaggtcaaggaggtcacgcagaatgaaggcaccaagaccatcgccaataaccttaccagcacgattcaggtatttacggactcggaataccagctgccgtacgtcctcggctccgcgcaccagggctgcctgcctccgttcccggcggacgtcttcatgattccccagtacggctaccttacactgaacaatggaagtcaagccgtaggccgttcctccttctactgcctggaatattttccatctcaaatgctgcgaactggaaacaattttgaattcagctacaccttcgaggacgtgcctttccacagcagctacgcacacagccagagcttggaccgactgatgaatcctctcatcgaccagtacctgtactacttatccagaactcagtccacaggaggaactcaaggtacccagcaattgttattttctcaagctgggcctgcaaacatgtcggctcaggctaagaactggctacctggaccttgctaccggcagcagcgagtctctacgacactgtcgcaaaacaacaacagcaactttgcttggactggtgccaccaaatatcacctgaacggaagagactctttggtaaatcccggtgtcgccatggcaacccacaaggacgacgaggaacgcttcttcccgtcgagtggagtcctgatgtttggaaaacagggtgctggaagagacaatgtggactacagcagcgttatgctaaccagcgaagaagaaattaaaaccactaaccctgtagccacagaacaatacggtgtggtggctgacaacttgcagcaaaccaatacagggcctattgtgggaaatgtcaacagccaaggagccttacctggcatggtctggcagaaccgagacgtgtacctgcagggtcccatctgggccaagattcctcacacggacggcaactgccacccttcaccgctaatgggaggatttggactgaagcacccacctcctcagatcctgatcaagaacacgccggtacctgcggatcctccaacaacgttcagccaggcgaaattggcttccttcattacgcagtacagcaccggacaggtcagcgtggaaatcgagtgggagctgcagaaggagaacagcaaacgctggaacccagagattcagtacacttcaaactactacaaatctacaaatgtggactttgctgtcaatacagagggaacttattctgagcctcgccccattggtactcgttacctcacccgtaatctgtaa

SEQ ID NO: 4980 - protein, 735 aa, Adeno-associated virus
MAADGYLPDWLEDTLSEGTRQWWKLKPGPPPPKPAERHKDDSRGLVLPGYKYLGPFNGLDKGEPVNEADAAALEHDKAYDRQLDSGDNPYLKYNHADAEFQERLKEDTSFGGNLGRAVFQAKKRVLEPLGLVEEPVKTAPGKKRPVEHSPAEPDSSSGTGKAGQQPARKRLNFGQTGDADSVPDPQPLGQPPAAPSGLGSTTMATGSGAPMADNNEGADGVGNSSGNWHCDSQWLGDRVITTSTRTWALPTYNNHLYKQISSQSGASNDNHYFGYSTPWGYFDFNRFHCHFSPRDWQRLINNNWGFRPKRLNFKLFNIQVKEVTQNDGTTTIANNLTSTVQVFTDSEYQLPYVLGSAHQGCLPPFPADVFMVPQYGYLTLNNGSQAVGRSSFYCLEYFPSQMLRTGNNFQFSYTFEDVPFHSSYAHSQSLDRLMNPLIDQYLYYLNKTQSNSGTLQQSRLLFSQAGPTSMSLQAKNWLPGPCYRQQRLSKQANDNNNSNFPWTAATKYHLNGRDSLVNPGPAMASHKDDEEKFFPMHGTLIFGKQGTNANDADLDNVMITDEEEIRTTNPVATEQYGYVSNNLQNSNTGPTTGTVNHQGALPGMVWQDRDVYLQGPIWAKIPHTDGHFHPSPLMGGFGLKHPPPQIMIKNTPVPANPPTNFSSAKFASFITQYSTGQVSVEIEWELQKENSKRWNPEIQYTSNYNKSVNVDFTVDTNGVYSEPRPIGTRYLTRNL

SEQ ID NO: 4981 - DNA, 2208 bp, Adeno-associated virus
atggctgccgatggttatcttccagattggctcgaggacactctctctgaaggaataagacagtggtggaagctcaaacctggcccaccaccaccaaagcccgcagagcggcatcaggacaacagcaggggtcttgtgcttcctgggtacaagtacctcggaccctccaacggactcgacaaaggagagccggtcaacgaggcagacgccgcggccctcgagcacgacaaggcctacgaccggcagctcgacagcggagacaacccgtacctcaagtacaaccacgccgacgcggagtttcaggagcgtcttaaagaagatacgtcttttgggggcaacctcggacgagcagtcttccaggcgaaaaagagggttcttgaacctctgggcctggttgaggaacctgttaagacggctccgggaaaaaagaggccggtagagcactctcctgtggagccagactcctcctcgggaaccggaaaagcgggccatcagcctgcgagaaagagattgaattttggtcagactggagacgcagactccgtacctgacccccagcctctcggacagccaccagcagcccccacaagtttgggatctactacaatggctacaggcagtggcgcaccaatggcagacaataacgagggtgccgatggagtgggtaattcctcaggaaattggcattgcgattcccaatggctgggcgacagagtcatcaccaccagcacccgaacctgggccctgcccacctacaacaaccacctctacaagcaaatctccagccaatcaggagcctcgaacgacaaccactactttggctgcagcaccccctgggggtattttgacttcaacagattccactgtcacttctccccacgtgattggcaaagactcatcaacaacaactggggattccgacccaagagactcaacttcaagctctttaacattcaagtcaaagaggtcacgcagaatgacggtacgacgacgattgccaataaccttaccagcacggttcaggtgtttactgactcggagtacccgctcccgtacgtcctcggctcggcgcatcaaggatgcctcccgccgtttccagcggacgtcttcatggtcccacagtatggatacctcaccctgaacaacgggagtcaggcggtaggacgctcttccttttactgcctggagtactttccttctcagatgctgcgtaccggaaacaactttaccttcagctacacctttgaggacgttcctttccacagcagctacgctcacagccagagtttggaccggctgatgaatcctctgatcgaccagtatctatattatctgaacaggacacaatcaaatagtggaactcttcagcagtctaggctactgtttagccaagctggacccaccagcatgtctcttcaagctaaaaactggctgcctggaccttgctacagacagcagcgtctttcaaagcaggcaaacgacaacaacaacagcaactttccctggactgcggctacaaagtatcatctaaatggccgggactcgttggttaatccaggaccagctatggccagccacaaagacgatgaagaaaagtttttccccatgcatggaaccctgatatttggtaaacaaggaacaaatgctaacgacgcggatttggagcatgttatgattacagatgaagaagaaatcaggaccaccaatcctgtggctacagagcagtacggaaacgtgtcaaataatttgcaaaactcaaatactggtccaactacagaaaatgtcaatcaccagggagcgttacctggtatggtgtggcaggatcgagacgtgtacctgcagggacccatttgggccaagattcctcacaccgacggacactttcacccttctccactgatgggaggttttggactcaaacacccgcctcctcaaatcatgatcaaaaacactcccgttccagccaatcctcccacaaacttcagttctgccaagtttgcttctttcatcacacagtattccacgggccaggtcagcgtggagattgagtgggagctgcagaaggagaacagcaaacgctggaaccccgagatccagtatacttccaactacaacaaatctgttaatgtggactttactgtggacactaatggtgtgtattcagagccttgccccattggcaccagatacctgactcgtaatctgtaa

SEQ ID NO: 4982 - protein, 735 aa, Adeno-associated virus
MAADGYLPDWLEDTLSEGIRQWWKLKPGPPPPKPAERHQDNSRGLVLPGYKYLGPSNGLDKGEPVNEADAAALEHDKAYDRQLDSGDNPYLKYNHADAEFQERLKEDTSFGGNLGRAVFQAKKRVLEPLGLVEEPVKTAPGKKRPVEHSPVEPDSSSGTGKAGHQPARKRLNFGQTGDADSVPDPQPLGQPPAAPTSLGSTTMATGSGAPMADNNEGADGVGNSSGNWHCDSQWLGDRVITTSTRTWALPTYNNHLYKQISSQSGASNDNHYFGCSTPWGYFDFNRFHCHFSPRDWQRLINNNWGFRPKRLNFKLFNIQVKEVTQNDGTTTIANNLTSTVQVFTDSEYPLPYVLGSAHQGCLPPFPADVFMVPQYGYLTLNNGSQAVGRSSFYCLEYFPSQMLRTGNNFTFSYTFEDVPFHSSYAHSQSLDRLMNPLIDQYLYYLNRTQSNSGTLQQSRLLFSQAGPTSMSLQAKNWLPGPCYRQQRLSKQANDNNNSNFPWTAATKYHLNGRDSLVNPGPAMASHKDDEEKFFPMHGTLIFGKQGTNANDADLEHVMITDEEEIRTTNPVATEQYGNVSNNLQNSNTGPTTENVNHQGALPGMVWQDRDVYLQGPIWAKIPHTDGHFHPSPLMGGFGLKHPPPQIMIKNTPVPANPPTNFSSAKFASFITQYSTGQVSVEIEWELQKENSKRWNPEIQYTSNYNKSVNVDFTVDTNGVYSEPCPIGTRYLTRNL

SEQ ID NO: 4983 - DNA, 2196 bp, Adeno-associated virus
atggctgctgacggttatcttccagattggctcgaggacaacctctctgagggcattcgcgagtggtgggcgctgaaacctggagccccgcaacccaaagccaaccagcaaaagcaggacgacggccggggtctggtgcttcctggctacaagtacctcggacccttcaacggactcgacaagggggagcccgtcaacgaggcggacgccgcggccctcgagcacgacaaggcctacgaccagcagctcaaagcgggtgacaatccgtacctgcggtataatcacgccgacgccgagtttcaagagcgtctgcaagaagatacgtcctttgggggcaacctcgggcgagcagtcttccaggccaaaaagagggtactcgagcctctgggtctggttgaggaaggcgctaagacggctcctggaaagaagcggccagtagaaccggactccagctcgggcatcggcaagtcaggccagcagcccgcgaaaaagagactgaattttgggcagactggcgactcagagtcagtgcctgacccccaacctctctcagaaccacccgcaggtccctctggtctgggatctggtacaatggctgctggcggtggcgctccaatggcagacaataacgaaggcgccgacggagtgggtaatgtctcaggaaattggcattgcgattccacatggctgggcgaccgagtcatcaccaccagcactcggacctgggccctccccacctacaacaaccacctctacaagcaaatctccaacgggacctcgggaggcagcagcaacgacaacacctactttggctacagcaccccctgggggtattttgactttaacagattccactgccacttttcaccacgtgactggcagcgactcatcaacaacaactgggggttccggcccaagaagctcaacttcaagctcttcaacatccaggtcaaggaggtcacccagaatgaaggcaccaagaccatcgccaataacctcaccagcacggtgcaggtctttacggactcggagtaccagctcccgtacgtgctcggctctgcccaccagggctgcctgcctccgttcccggcggacgtgttcatgattccgcagtacgggtacctgacgctgaacaacgggagccaggccgtggggcgatcctccttctactgcctggagtactttccctcgcagatgctgagaacgggcaacaactttaccttcagctacaccttcgaggacgtgcccttccacagcagctacgcgcacagccagagcctggaccggctgatgaacccgctgattgaccagtacctgtactacctgtctcggactcagaccaacgggaccaatgccacgcagactctgttgtttgctcaggccgggcctcagaacatgtcggctcaggccaagaactggctgcctggtccttgctatcggcagcagcgcgtctctacgacagtgtcgcaaaacaacaacagcaactttacctggaccggggcgaccaagtaccacctgaacggccgagactccctggtgagccccggtgtcgccatggcaacgcacaaggacgacgaggagcgcttcttcccgagcagcggggtcctgatgtttggcaagcagggcgctggaaaggacaatgtcgagtacaccaacgtgatgctcaccagcgaggaggagatcaagaccaccaaccctgtggccacggagcagtacggcgtggtggctgacaatctgcagcagaccaactcagctcccattgtgggggcagtcaacagccagggggccttacccggtatggtctggcagaaccgggacgtgtacctgcagggtcccatctgggccaagatcccgcatacggacggcaactttcacccgtctcctctcatgggcggctttggactgaaacacccgcctccccagatcctgatcaaaaacacgccggtacctgcggatcccccggtgaactttacggacgctaagctggcgagtttcatcacgcagtacagcaccgggcaggtcagcgtggagattgagtgggagctgcagaaggagaacagcaagcgctggaatcccgagattcagtacacttccaattattataaatcagctaatgtggactttgccgtcaatgcagatggtgtatatagtgaaccccgccccattggcactcgttacctcacccgtaatctgtaa

SEQ ID NO: 4984 - protein, 731 aa, Adeno-associated virus
MAADGYLPDWLEDNLSEGIREWWALKPGAPQPKANQQKQDDGRGLVLPGYKYLGPFNGLDKGEPVNEADAAALEHDKAYDQQLKAGDNPYLRYNHADAEFQERLQEDTSFGGNLGRAVFQAKKRVLEPLGLVEEGAKTAPGKKRPVEPDSSSGIGKSGQQPAKKRLNFGQTGDSESVPDPQPLSEPPAGPSGLGSGTMAAGGGAPMADNNEGADGVGNVSGNWHCDSTWLGDRVITTSTRTWALPTYNNHLYKQISNGTSGGSSNDNTYFGYSTPWGYFDFNRFHCHFSPRDWQRLINNNWGFRPKKLNFKLFNIQVKEVTQNEGTKTIANNLTSTVQVFTDSEYQLPYVLGSAHQGCLPPFPADVFMIPQYGYLTLNNGSQAVGRSSFYCLEYFPSQMLRTGNNFTFSYTFEDVPFHSSYAHSQSLDRLMNPLIDQYLYYLSRTQTNGTNATQTLLFAQAGPQNMSAQAKNWLPGPCYRQQRVSTTVSQNNNSNFTWTGATKYHLNGRDSLVSPGVAMATHKDDEERFFPSSGVLMFGKQGAGKDNVEYTNVMLTSEEEIKTTNPVATEQYGVVADNLQQTNSAPIVGAVNSQGALPGMVWQNRDVYLQGPIWAKIPHTDGNFHPSPLMGGFGLKHPPPQILIKNTPVPADPPVNFTDAKLASFITQYSTGQVSVEIEWELQKENSKRWNPEIQYTSNYYKSANVDFAVNADGVYSEPRPIGTRYLTRNL

SEQ ID NO: 4985 - DNA, 2196 bp, Adeno-associated virus
atggctgctgacggttatcttccagattggctcgaggacaacctctctgagggcattcgcgagtggtgggcgctgaaacctggagccccgcaacccaaagccaaccagcaaaagcaggacgacggccggggtctggtgcttcctggctacaagtacctcggacccttcaacggactcgacaagggggagcccgtcaacgaggcggacgccgcggccctcgagcacgacaaggcctacgaccagcagctcaaagcgggtgacaatccgtacctgcggtataatcacgccgacgccgagtttcaagagcgtctgcaagaagatacgtcctttgggggcaacctcgggcgagcagtcttccaggccaaaaagagggtactcgagcctctgggtctggttgaggaaggcgctaagacggctcctggaaagaagcggccagtagaaccggactccagctcgggcatcggcaagtcaggccggcagcccgcgaaaaagagactgaattttgggcagactggcgactcagagtcagtgcctgacccccaacctctctcagaaccacccgcaggtccctctggtctgggatctggtacaatggctgcaggcggtggcgctccaatggcagacaataacgaaggcgccgacggagtgggtaatgcctcaggaaattggcattgcgattccacatggctgggcgaccgagtcatcaccaccagcactcggacctgggccctccccacctacaacaaccacctctacaagcaaatctccaacgggacctcgggaggcagcagcaacgacaacacctactttggctacagcaccccctgggggtattttgactttaacagattccactgccacttttcaccacgtgactggcagcgactcatcaacaacaactggggattccggcccaagaggctcaacttcaagctcttcaacatccaggtcaaggaggtcacccagaatgaaggcaccaagaccatcgccaataacctcaccagcacggtgcaggtctttacggactcgaagtaccagctcccgtacgtgctcggctctgcccaccagggctgcctgcctccgttcccggcggacgtgttcatgattccgcagtacgggtacctgacgctgaacaacgggagccaggccgtggggcgatcctccttctactgcctggagtactttccctcgcagatgctgagaacgggcaacaactttaccttcagctacaccttcgaggacgtgcccttccacagcagctacgcgcacagccagagcctggaccggctgatgaacccgctgattgaccagtacctgtactacctgtctcggactcagaccaacgggaccaatgccacgcagactctgttgtttgctcaggccgggcctcagaacatgtcggctcaggccaagaactggctgcctggtccttgctatcggcagcagcgcgtctctacgacagtgtcgcaaaacaacaacagcaactttacctggaccggggcgaccaagtaccacctgaacggccgagactccctggtgaaccccggtgtcgccatggcaacgcacaaggacgacgaggagcgcttcttcccgagcagcggggtcctgatgtttggcaagcagggcgctggaaaggacaatgtcgagtacaccaacgtgatgctcaccagcgaggaggagatcaagaccaccaaccctgtggccacggagcagtacggtgtggtggctgacaatctgcagcagaccaactcggctcccattgtgggggcagtcaacagccagggggccttacccggtatggtctggcagaaccgggacgtgtacctgcagggtcccatctgggccaagatcccgcatacggacggcaactttcacccgtctcctctcatgggcggctttggactgaaacacccgcctccccagatcctgatcaaaaacacgccggtacctgcggatcccccggtgaactttacggacgctaagctggcgagtttcatcacgcagtacagcaccgggcaggtcagcgtggagattgagtgggagctgcagaaggagaacagcaagcgctggaatcccgagattcagtacacttccaattattataaatcagctaatgtggactttgccgtcaatgcagatggtgtatatagtgaaccccgccccattggcactcgttacctcacccgtaatctgtaa

SEQ ID NO: 4986 - protein, 731 aa, Adeno-associated virus
MAADGYLPDWLEDNLSEGIREWWALKPGAPQPKANQQKQDDGRGLVLPGYKYLGPFNGLDKGEPVNEADAAALEHDKAYDQQLKAGDNPYLRYNHADAEFQERLQEDTSFGGNLGRAVFQAKKRVLEPLGLVEEGAKTAPGKKRPVEPDSSSGIGKSGRQPAKKRLNFGQTGDSESVPDPQPLSEPPAGPSGLGSGTMAAGGGAPMADNNEGADGVGNASGNWHCDSTWLGDRVITTSTRTWALPTYNNHLYKQISNGTSGGSSNDNTYFGYSTPWGYFDFNRFHCHFSPRDWQRLINNNWGFRPKRLNFKLFNIQVKEVTQNEGTKTIANNLTSTVQVFTDSKYQLPYVLGSAHQGCLPPFPADVFMIPQYGYLTLNNGSQAVGRSSFYCLEYFPSQMLRTGNNFTFSYTFEDVPFHSSYAHSQSLDRLMNPLIDQYLYYLSRTQTNGTNATQTLLFAQAGPQNMSAQAKNWLPGPCYRQQRVSTTVSQNNNSNFTWTGATKYHLNGRDSLVNPGVAMATHKDDEERFFPSSGVLMFGKQGAGKDNVEYTNVMLTSEEEIKTTNPVATEQYGVVADNLQQTNSAPIVGAVNSQGALPGMVWQNRDVYLQGPIWAKIPHTDGNFHPSPLMGGFGLKHPPPQILIKNTPVPADPPVNFTDAKLASFITQYSTGQVSVEIEWELQKENSKRWNPEIQYTSNYYKSANVDFAVNADGVYSEPRPIGTRYLTRNL

SEQ ID NO: 4987 - DNA, 2196 bp, Adeno-associated virus
atggctgctgacggttatcttccagattggctcgaggacaacctctctgagggcattcgcgagtggtgggcgctgaaacctggagccccgcaacccaaagccaaccagcaaaagcaggacgacggccggggtctggtgcttcctggctacaagtacctcggacccttcaacggactcgacaagggggagcccgtcaacgaggcggacgccgcggccctcgagcacgacaaggcctacgaccagcagctcaaagcgggtgacaatccgtacctgcggtataatcacgccgacgccgagtttcaagagcgtctgcaagaagatacgtcctttgggggcaacctcgggcgagcagtcttccaggccaaaaagagggtactcgagcctctgggtctggttgaggaaggcgctaagacggctcctggaaagaagcggccagtagaaccggactccagctcgggcatcggcaagtcaggccagcagcccgcgaaaaagagactgaattttgggccgactggcgactcagagtcagtgcctgacccccaacctctctcagaaccacctgcaggtccctctggtctgggatctggtacaatggctgcaggcggtggcgctccaatggcagacaataacgaaggcgccgacggagtgggtaatgtctcaggaaattggcattgcgattccacatggctgggcgaccgagtcatcaccaccagcactcggacctgggccctccccacctacaacaaccacctctacaagcaaatctccaacgggacctcgggaggcagcagcaacgacaacacctactttggctacagcaccccctgggggtattttgactttaacagattccactgccacttttcaccacgcgactggcagcgactcatcaacaacaactggggattccggcccaagaagctcaacttcaagctcttcaacatccaggtcaaggaggtcacccagaatgaaggcaccaagaccaccgccaataacctcaccagcacggtgcaggtctttacggactcggagtaccagctcccgtacgtgctcggctctgcccaccagggctgcctgcctccgttcccggcggacgtgttcatgattccgcagtacgggtacctgacgctgaacaacgggagccaggccgtggggcgatcctccttctactgcctggagtactttccctcgcagatgctgagaacgggcaacaactttaccttcagctacaccttcgaggacgtgcccttccacagcagctacgcgcacagccagagcctggaccggctgatgaacccgctgattgaccagtacctgtactacctgtctcggactcagaccaacgggaccaatgccacgcagactctgttgtttgctcaggccgggcctcagaacatgtcggctcaggccaagaactggctgcctggtccttgctatcggcagcagcgcgtctctacggcagtgtcgcaaaacaacaacagcaactttacctggaccggggcgaccaagtaccacctgaacggccgagactccctggtgaaccccggtgtcgccatggcaacgcacaaggacgacgaggagcgcttcttcccgagcagcggggtcctgatgtttggcaagcagggcgctggaaaggacaatgtcgagtacaccaacgtgatgctcaccagcgaggaggagatcaagaccaccaaccctgtggccacggagcagtacggtgtggtggctgacaatctgcagcagaccaactcggctcccattgtgggggcagtcaacagccagggggccttacccggtatggtctggcagaaccgggacgtgtacctgcagggtcccatctgggccaagatcccgcatacggacggcaactttcacccgtctcctctcatgggcggctttggactgaaacacccgcctccccagatcctgatcaaaaacacgccggtacctgcggatcccccggtgaactttacggacgctaagctggcgagtttcatcacgcagtacagcaccgggcaggtcagcgtggagattgagtgggagctgcagaaggagaacagcaagcgctggaatcccgagattcagtacacttccaattattataaatcagctaatgtggactttgccgtcaatgcagatggtgtatatagcgaaccccgccccattggcactcgttacctcacccgtaatctgtaa

SEQ ID NO: 4988 - protein, 731 aa, Adeno-associated virus
MAADGYLPDWLEDNLSEGIREWWALKPGAPQPKANQQKQDDGRGLVLPGYKYLGPFNGLDKGEPVNEADAAALEHDKAYDQQLKAGDNPYLRYNHADAEFQERLQEDTSFGGNLGRAVFQAKKRVLEPLGLVEEGAKTAPGKKRPVEPDSSSGIGKSGQQPAKKRLNFGPTGDSESVPDPQPLSEPPAGPSGLGSGTMAAGGGAPMADNNEGADGVGNVSGNWHCDSTWLGDRVITTSTRTWALPTYNNHLYKQISNGTSGGSSNDNTYFGYSTPWGYFDFNRFHCHFSPRDWQRLINNNWGFRPKKLNFKLFNIQVKEVTQNEGTKTTANNLTSTVQVFTDSEYQLPYVLGSAHQGCLPPFPADVFMIPQYGYLTLNNGSQAVGRSSFYCLEYFPSQMLRTGNNFTFSYTFEDVPFHSSYAHSQSLDRLMNPLIDQYLYYLSRTQTNGTNATQTLLFAQAGPQNMSAQAKNWLPGPCYRQQRVSTAVSQNNNSNFTWTGATKYHLNGRDSLVNPGVAMATHKDDEERFFPSSGVLMFGKQGAGKDNVEYTNVMLTSEEEIKTTNPVATEQYGVVADNLQQTNSAPIVGAVNSQGALPGMVWQNRDVYLQGPIWAKIPHTDGNFHPSPLMGGFGLKHPPPQILIKNTPVPADPPVNFTDAKLASFITQYSTGQVSVEIEWELQKENSKRWNPEIQYTSNYYKSANVDFAVNADGVYSEPRPIGTRYLTRNL

SEQ ID NO: 4989 - DNA, 4404 bp, Adeno-associated virus
atggctgccgatggttatcttccagattggctcgagggcaacctctctgagggcattcgcgagtggtgggacttgaaacctggagccccgaaacccaaagccaaccagcaaaagcaggacgacggccggggtctggtgcttcctggctacaggtacctcggacccttcaacggactcgacaagggagagccggtcaacgaggcagacgccgcggccctcgagcacgacaaggcctacgacaagcagctcgagcagggggacaacccgtacctcaagtacaaccacgccgacgccgagtttcaggagcgtcttcaagaagatacgtcttttgggggcaacctcgggcgagcagtcttccaggccaagaagcgggttctcgaacctctcggtctggttgaggaaggcgctaagacggctcctggaaagaagagacccatagaatcccccgactcctccacgggcatcggcaagaacggccagccgcccgctaaaaagaagctcaactttgggcagactggcgactcagagtcagtgcccgacccccaacctctcggagaacctcccgccgcgccctcaggtctgggatctggtacaatggctgcaggcggtggcgcaccaatggcagacaataacgaaggcgccgacggagtgggtaatgcctccggaaattggcattgcgattccacatggctgggcgacagagtcatcaccaccagcacccgcacctgggccctgcccacctacaacaaccacctctacaagcagatatcaagtcagagcggggctaccaacgacaaccacttcttcggctacagcaccccctggggctattttgacttcaacagattccactgccacttctcaccacgtgactggcagcgactcatcaacaacaactggggattccggcccagaaagctgcggttcaagttgttcaacatccaggtcaaggaggtcacgacgaacgacggcgttacgaccatcgctaataaccttaccagcacgattcaggtcttctcggactcggagtaccaactgccgtacgtcctcggctctgcgcaccagggctgcctccctccgttccctgcggacgtgttcatgattcctcagtacggatatctgactctaaacaacggcagtcagtctgtgggacgttcctccttctactgcctggagtactttccttctcagatgctgagaacgggcgataactttgaattcagctacacctttgaggaagtgcctttccacagcagctatgcgcacagccagagcctggaccggctgatgaatcccctcatcgaccagtacctgtactacctggcccggacccagagcactacggggtccacaagggagctgcagttccatcaggctgggcccaacaccatggccgagcaatcaaagaactggctgcccggaccctgttatcggcagcagagactgtcaaaaaacatagacagcaacaacaacagtaactttgcctggaccggggccactaaataccatctgaatggtagaaattcattaaccaacccgggcgtagccatggccaccaacaaggacgacgaggaccagttctttcccatcaacggagtgctggtttttggcaaaacgggggctgccaacaagacaacgctggaaaacgtgctaatgaccagcgaggaggagatcaaaaccaccaatcccgtggctacagaagaatacggtgtggtctccagcaacctgcaatcgtctacggccggaccccagacacagactgtcaacagccagggggctctgcccggcatggtctggcagaaccgggacgtgtacctgcagggtcccatctgggccaaaattcctcacacggacggcaactttcacccgtctcccctgatgggcggatttggactcaaacacccgcctcctcaaattctcatcaaaaacaccccggtacctgctaatcctccagaggtgtttactcctgccaagtttgcctcatttatcacgcagtacagcaccggccaggtcagcgtggagatcgagtgggaactgcagaaagaaaacagcaaacgctggaatccagagattcagtacacctcaaattatgccaagtctaataatgtggaatttgctgtcaacaacgaaggggtttatactgagcctcgccccattggcacccgttacctcacccgtaacctgtaaatggctgccgatggttatcttccagattggctcgaggacaacctctctgagggcattcgcgagtggtgggacttgaaacctggagccccgaaacccaaagccaaccagcaaaagcaggacgacggccggggtctggtgcttcctggctacaagtacctcggacccttcaacggactcgacaagggggagcccgtcaacgcggcggacgcagcggccctcgagcacgacaaggcctacgaccagcagctcaaagcgggtgacaatccgtacctgcggtataaccacgccgacgccgagtttcaggagcgtctgcaagaagatacgtcttttgggggcaacctcgggcgagcagtcttccaggccaagaagcgggttctcgaacctctcggtctggttgaggaaggcgctaagacggctcctggaaagaagagaccggtagagccatcaccccagcgttctccagactcctctacgggcatcggcaagaaaggccagcagcccgcgaaaaagagactcaactttgggcagactggcgactcagagtcagtgcccgaccctcaaccaatcggagaaccccccgcaggcccctctggtctgggatctggtacaatggctgcaggcggtggcgctccaatggcagacaataacgaaggcgccgacggagtgggtagttcctcaggaaattggcattgcgattccacatggctgggcgacagagtcatcaccaccagcacccgaacctgggccctccccacctacaacaaccacctctacaagcaaatctccaacgggacttcgggaggaagcaccaacgacaacacctacttcggctacagcaccccctgggggtattttgactttaacagattccactgccacttctcaccacgtgactggcagcgactcatcaacaacaactggggattccggcccaagagactcaacttcaagctcttcaacatccaggtcaaggaggtcacgcagaatgaaggcaccaagaccatcgccaataaccttaccagcacgattcaggtctttacggactcggaataccagctcccgtacgtcctcggctctgcgcaccagggctgcctgcctccgttcccggcggacgtcttcatgattcctcagtacgggtacctgactctgaacaatggcagtcaggccgtgggccgttcctccttctactgcctggagtactttccttctcaaatgctgagaacgggcaacaactttgagttcagctaccagtttgaggacgtgccttttcacagcagctacgcgcacagccaaagcctggaccggctgatgaaccccctcatcgaccagtacctgtactacctgtctcggactcagtccacgggaggtaccgcaggaactcagcagttgctattttctcaggccgggcctaataacatgtcggctcaggccaaaaactggctacccgggccctgctaccggcagcaacgcgtctccacgacactgtcgcaaaataacaacagcaactttgcctggaccggtgccaccaagtatcatctgaatggcagagactctctggtaaatcccggtgtcgctatggcaacccacaaggacgacgaagagcgattttttccgtccagcggagtcttaatgtttgggaaacagggagctggaaaagacaacgtggactatagcagcgttatgctaaccagtgaggaagaaattaaaaccaccaacccagtggccacagaacagtacggcgtggtggccgataacctgcaacagcaaaacgccgctcctattgtaggggccgtcaacagtcaaggagccttacctggcatggtctggcagaaccgggacgtgtacctgcagggtcctatctgggccaagattcctcacacggacggaaactttcatccctcgccgctgatgggaggctttggactgaaacacccgcctcctcagatcctgattaagaatacacctgttcccgcggatcctccaactaccttcagtcaagctaagctggcgtcgttcatcacgcagtacagcaccggacaggtcagcgtggaaattgaatgggagctgcagaaagaaaacagcaaacgctggaacccagagattcaatacacttccaactactacaaatctacaaatgtggactttgctgttaacacagatggcacttattctgagcctcgccccatcggcacccgttacctcacccgtaatctgtaa

SEQ ID NO: 4990 - protein, 738 aa, Adeno-associated virus; identical to SEQ ID NO: 4793

SEQ ID NO: 4991 - protein, 738 aa, Adeno-associated virus; identical to SEQ ID NO: 4793

SEQ ID NO: 4992 - DNA, 2501 bp, Adeno-associated virus
gaattcgcccttggctgcgtcaactggaccaatgagaactttcccttcaacgattgcgtcgacaagatggtgatctggtgggaggagggcaagatgacggccaaggtcgtggagtccgccaaggccattcatcatctgctggggcgggctcccgagattgcttgctcggcctgcgatctggtcaacgtggacctggatgactgtgtttctgagcaataaatgacttaaaccaggtatggctgccgatggttatcttccagattggctcgaggacaacctctctgagggcattcgcgagtggtgggacttgagacctggagccccgaaacccaaagccaaccagcaaaagcaggacgacggccggggtctggtgcttcctggctacaagtacctcggacccttcaacggactcgacaagggagagccggtcaacgaggcagacgccgcggccctcgagcacgacaaggcctacgacaagcagctcgagcagggggacaacccgtacctcaagtacaaccacgccgacgccgagtttcaggagcgtcttcaagaagatacgtcttttgggggcaacctcgggcgagcagtcttccaggccaagaagcgggttctcgaacctctcggtctggttgaggaaggcgctaagacggctcctggaaagaagagacccatagaatcccccgactcctccacgggcatcggcaagaaaggccagcagcccgctaaaaagagactcaactttgggcagactggcgactcagagtcagtgcccgaccctcaaccaatcggagaaccccccgcaggcccctctggtctgggatctggcacaatggctgcaggcggtggcgctccaatggcagacaataacgaaggcgccgacggagtgggtagttcctcaggaaattggcattgcgattccacatggctgggcgacagagtcatcaccaccagcacccgaacctgggccctccccacctacaacaaccacctctacaagcaaatctccaacgggacatcgggaggaagcaccaacgacaacacctacttcggctacagcaccccctgggggtattttgactttaacagattccactgccacttctcaccacgtgactggcagcgactcatcaacaacaactggggattccggcccaagagactcaacttcaagctcttcaacatccaggtcaaggaggtcacgcagaatgaaggcaccaagaccatcgccaataaccttaccagcacgattcaggtctttacggactcggaataccagctcccgtacgtcctcggctctgcgcaccagggctgcctgcctccgttcccggcggacgtcttcatgattcctcagtacgggtacctgactctgaacaacggcagtcaggccgtgggccgttcctccttctactgcctggagtactttccttctcaaatgctgagaacgggcaacaactttgagttcagctaccagtttgaggacgtgccttttcacagcagctatgcgcacagccaaagcctggaccggctgatgaaccccctcatcgaccagtacctgtactacctgtctcggactcagtccacgggaggtaccgcaggaactcagcagttgctattttctcaggccgggcctaataacatgtcggctcaggccaaaaactggctacccgggccctgctaccggcagcaacgcgtctccacgacagtgtcgcaaaataacaacagcaactttgcttggaccggtgccaccaagtatcatctgaatggcagagactctctggtaaatcccggtgtcgctatggcaacgcacaagggcgacgaagagcgattttttccatccagcggagtcttgatgtttgggaaacagggagctggaaaagacaacgtagactatagcagcgttatgctaaccagtgaggaagaaatcaaaaccaccaacccagtggccacagaacagtacggcgtggtggccgataacctgcaacagcaaaacgccgctcctattgtaggggccgtcaacagtcaaggagccttacctggcatggtctggcagaaccgggacgtgtacctgcagggtcctatctgggccaagattcctcacacggacggcaactttcatccttcgccgctgatgggaggctttggactgaaacacccgcctcctcagatcctgattaagaatacacctgttcccgcggatcctccaactaccttcagtcaagccaagctggcgtcgttcatcacgcagtacagcaccggacaggtcagcgtggaaattgaatgggagctgcagaaagagaacagcaagcgctggaacccagagattcagtatacttccaactactacaaatctacaaatgtggactttgctgtcaatactgagggtacttattcagagcctcgccccattggcacccgttacctcacccgtaacctgtaattgcctgttaatcaataaaccggttgattcgtttcagttgaactttggtctcaagggcgaattc

SEQ ID NO: 4993 - DNA, 2187 bp, Adeno-associated virus
atggctgccgatggttatcttccagattggctcgaggacaacctctctgagggcattcgcgagtggtgggacttgaaacctggagccccgaaacccaaagccaaccagcaaaagcaggacgacggccggggtctggtgcttcctggctacaagtacctcggacccttcaacggactcgacaagggagagccggtcaacgaggcagacgccgcggccctcgagcacgacaaggcctacgacaagcagctcgagcagggggacaacccgtacctcaagtacaaccacgccgacgccgagtttcaggagcgtcttcaagaagatacgtcttttgggggcaacctcgggcgagcagtcttccaggccaagaagcgggttctcgaacctctcggtctggttgaggaaggcgctaagacggctcctggaaagaagagacccatagaatcccccgactcctccacgggcatcggcaagaaaggccagcagcccgctaaaaagaagctcaactttgggcagactggcgactcagagtcagtgcccgacccccaacctctcggagaacctcccgccgcgccctcaggtctgggatctggtacaatggctgcaggcggtggcgcaccaatggcagacaataacgaaggcgccgacggagtgggtaatgcctccggaaattggcattgcgattccacatggctgggcgacagagtcatcaccaccagcacccgcacctgggccctgcccacctacaacaaccacctctacaagcagatatcaagtcagagcggggctaccaacgacaaccacttcttcggctacagcaccccctggggctattttgacttcaacagattccactgccacttctcaccacgtgactggcagcgactcatcaacaacaactggggattccggcccagaaagctgcggttcaagttgttcaacatccaggtcaaggaggtcacgacgaacgacggcgttacgaccatcgctaataaccttaccagcacgattcaggtcttctcggactcggagtaccaactgccgtacgtcctcggctctgcgcaccagggctgcctccctccgttccctgcggacgtgttcatgattcctcagtacggatatctgactctaaacaacggcagtcagtctgtgggacgttcctccttctactgcctggagtactttccttctcagatgctgagaacgggcaataactttgaattcagctacacctttgaggaagtgcctttccacagcagctatgcgcacagccagagcctggaccggctgatgaatcccctcatcgaccagtacctgtactacctggcccggacccagagcactacggggtccacaagggagctgcagttccatcaggctgggcccaacaccatggccgagcaatcaaagaactggctgcccggaccctgttatcggcagcagagactgtcaaaaaacatagacagcaacaacaacagtaactttgcctggaccggggccactaaataccatctgaatggtagaaattcattaaccaacccgggcgtagccatggccaccaacaaggacgacgaggaccagttctttcccatcaacggagtgctggtttttggcgaaacgggggctgccaacaagacaacgctggaaaacgtgctaatgaccagcgaggaggagatcaaaaccaccaatcccgtggctacagaagaatacggtgtggtctccagcaacctgcaatcgtctacggccggaccccagacacagactgtcaacagccagggggctctgcccggcatggtctggcagaaccgggacgtgtacctgcagggtcccatctgggccaaaattcctcacacggacggcaactttcacccgtctcccctgatgggcggatttggactcaaacacccgcctcctcaaattctcatcaaaaacaccccggtacctgctaatcctccagaggtgtttactcctgccaagtttgcctcatttatcacgcagtacagcaccggccaggtcagcgtggagatcgagtgggaactgcagaaagaaaacagcaaacgctggaatccagagattcagtacacctcaaattatgccaagtctaataatgtggaatttgctgtcaacaacgaaggggtttatactgagcctcgccccattggcacccgttacctcacccgtaacctgtaa

SEQ ID NO: 4994 - protein, 728 aa, Adeno-associated virus; identical to SEQ ID NO: 4765

SEQ ID NO: 4995 - protein, 728 aa, Adeno-associated virus; identical to SEQ ID NO: 4829

SEQ ID NO: 4996 - protein, 728 aa, Adeno-associated virus; identical to SEQ ID NO: 4829

SEQ ID NO: 4997 - DNA, 3113 bp, Adeno-associated virus
gaattcgccctttctacggctgcgtcaactggaccaatgagaactttcccttcaacgattgcgtcgacaagatggtgatctggtgggaggagggcaagatgacggccaaggtcgtggagtccgccaaggccattctcggcggcagcaaggtgcgcgtggaccaaaagtgcaagtcgtccgcccagatcgatcccacccccgtgatcgtcacttccaacaccaacatgtgcgccgtgattgacgggaacagcaccaccttcgagcaccagcagccgttacaagaccggatgttcaaatttgaactcacccgccgtctggagcatgactttggcaaggtgacaaagcaggaagtcaaagagttcttccgctgggcgcaggatcacgtgaccgaggtggcgcatgagttctacgtcagaaagggtggagccaacaagagacccgcccccgatgacgcggataaaagcgagcccaagcgggcctgcccctcagtcgcggatccatcgacgtcagacgcggaaggagctccggtggactttgccgacaggtaccaaaacaaatgttctcgtcacgcgggcatgcttcagatgctgcttccctgcaagacatgcgagagaatgaatcagaatttcagcatttgcttcacgcacgggaccagagactgttcagaatgtttccccggcgtgtcagaatctcaaccggtcgtcagaaagaggacgtatcggaaactctgtgccattcatcatctgctggggcgggctcccgagattgcttgctcggcctgcgatctggtcaacgtggacctggatgactgtgtttctgagcaataaatgacttaaaccaggtatggctgccgatggtcatcttccagattggctcgaggacaacctctctgagggcattcgcgagtggtgggacttgaaacctggagccccgaaacccaaagccaaccagcaaaagcaggacgacggccggggtctggtgcttcctggctacaagtacctcggacccttcaacggactcgacaagggggagcccgtcaacgcggcggacgcagcggccctcgagcacgacaaggcctacgaccagcagctcaaagcgggtgacaatccgtacctgcggtataaccacgccgacgccgagtttcaggagcgtcttcaagaagatacgtcttttgggggcaacctcgggcgagcagtcttccaggccaagaagcgggttctcgaacctctcggtctggttgaggaaggcgctaagacggctcctggaaagaagagacccatagaatcccccgactcctccacgggcatcggcaagaaaggccagcagcccgctaaaaagaagctcaactttgggcagactggcgactcagagtcagtgcccgaccctcaaccaatcggagaaccccccgcaggcccctctggtctgggatctggtacaatggctgcaggcggtggcgctccaatggcagacaataacgaaggcgccgacggagtgggtagttcctcaggaaattggcattgcgattccacatagctgggcgacagagtcatcaccaccagcacccgaacctgggccctccccacctacaacaaccacctctacaagcaaatctccaacgggacatcgggaggaagcaccaacgacaacacctacttcggctacagcaccccctgggggtattttgactttaacagattccactgccacttctcaccacgtgactggcagcgactcatcaacaacagctggggattccggcccaagagactcaacttcaagctcttcaacatccaggtcaaggaggtcacgcagaatgaaggcaccaagaccatcgccaataaccttaccagcacgattcaggtctttacggactcggaataccagctcccgtacgtcctcggctctgcgcaccagggctgcctgcctccgttcccggcggacgtcttcatgattcctcagtacgggtacctgactctgaacaacggcagtcaggccgtgggccgttcctccttctactgcctggagtactttccttctcaaatgctgagaacgggcaacaactttgagttcagctaccagtttgaggacgtgccttttcacagcagctacgcgcacagccaaagcctggaccggctgatgaaccccctcatcgaccagtacctgtactacctgtctcggactcagtccacgggaggtaccgcaggaactcagcagttgctattttctcaggccgggcctaataacatgtcggctcaggccaaaaactggctacccgggccctgctaccggcagcaacgcgtctccacgacactgtcgcaaaataacaacagcaactttgcttggaccggtgccaccaagtatcatctgaatggcagagactctctggtaaatcccggtgtcgctatggcaacgcacaaggacgacgaagagcgattttttccatccagcggagtcttgatgtttgggaaacagggagctggaaaagacaacgtggactatagcagcgttatgctaaccagtgaggaagaaatcaaaaccaccaacccagtggccacagaacagtacggcgtggtggccgataacctgcaacagcaaaacgccgctcctattgtaggggccgtcaacagtcaaggagccttacctggcatggtctggcagaaccgggacgtgtacctgcagggtcctatctgggccaagattcctcacacggacggcaactttcatccttcgccgctgatgggaggctttggactgaaacacccgcctcctcagatcctgattaagaatacacctgttcccgcggatcctccaactaccttcagtcaagccaagctggcgtcgttcatcacgcagtacagcaccggacaggtcagcgtggaaattgaatgggagctgcagaaagagaacagcaagcgctggaacccagagattcagtatacttccaactactacaaatctacaaatgtggactttgctgtcaatactgagggtacttattcagagcctcgccccattggcacccgttacctcacccgtaacctgtaattgcctgttaatcaataaaccggttaattcgtttcagttgaactttggtctctgcgaagggcgaattc

SEQ ID NO: 4998 - DNA, 3106 bp, Adeno-associated virus
gaattcgcccttctacggctgcgtcaactggaccaatgagaactttcccttcaacgattgcgtcgacaagatggtgatctggtgggaggagggcaagatgacggccaaggtcgtggagtccgccaaggccattctcggcggcagcaaggtgcgcgtggaccaaaagtgcaagtcgtccgcccagatcgaccccacccccgtgatcgtcacctccaacaccaacatgtgcgccgtgattgacgggaacagcaccaccttcgagcaccagcagccgttgcaggaccggatgttcaaatttgaactcacccgccgtctggagcatgactttggcaaggcgacaaagcaggaagtcaaagagttcttccgctgggcgcaggatcacgtgaccgaggtggcgcatgagttctacgtcagaaagggtggagccaacaagagacccgcccccgatgacgcggataaaagcgagcccaagcgggcccgcccctcagtcgcggatccatcgacgtcagacgcggaaggagctccggtggactttgccgacaggtaccaaaacaaatgttctcgtcacgcgggcatgcttcagatgctgtttccctgcaaaacatgcgagagaatgaatcagaatttcaacatttgcttcacgcacgggaccagagactgttcagaatgtttccccggcgtgtcagaatctcaaccggtcgtcagaaagaggacgtatcggaaactctgtgccattcatcatctgctggggcgggctcccgagattgcttgctcggcctgcgatctggtcaacgtggacctggatgactgtgtttctgagcaataaatgacttaaaccaggtatggctgccgatggttatcttccagattggctcgaggacaacctctctgagggcattcgcgagtggtgggacttgaaacctggagccccgaaacccaaagccaaccagcaaaagcaggacgacggccggggtctggtgcttcctggctacaagtacctcggacccttcaacggactcgacaagggagagccggtcaacgaggcagacgccgcggccctcgagcacgacaaggcctacgacaagcagctcgagcagggggacaacccgtacctcaagtacaaccacgccgacgccgagtttcaggagcgtcttcaagaagatacgtcttttgggggcaacctcgggcgagcagtcttccgggccaagaagcgggttctcgaacctctcggtctggttgaggaaggcgctaagacggctcctggaaagaagagacccatagaatcccccgactcctccacgggcatcggcaagaaaggccagcagcccgctaaaaagaagctcaactttgggcagactggcgactcagagtcagtgcccgacccccaacctctcggagaacctcccgccgcgccctcaggtctgggatctggtacaatggctgcaggcggtggcgcaccaatggcagacaataacgaaggcgccgacggagtgggtaatgcctccggaaattggcattgcgattccacatggctgggcgacagagtcatcaccaccagcacccgcacctgggccctgcccacctacaacaaccacctctacaagcagatatcaagtcagagcggggctaccaacgacaaccacttcttcggctacagcaccccctggggctattttgacttcaacagattccactgccacttctcaccacgtgactggcagcgactcatcaacaacaaccggggattccggcccagaaagctgcggttcaagttgttcaacatccaggtcaaggaggtcacgacgaacgacggcgttacgaccatcgctaataaccttaccagcacgattcaggtcttctcggactcggagtaccaactgccgtacgtcctcggctctgcgcaccagggctgcctccctccgttccctgcggacgtgttcatgattcctcagtacggatatctgactctaaacaacggcagtcagtctgtgggacgttcctccttctactgcctggagtactttccttctcagatgctgagaacgggcaataactttgaattcagctaccagtttgaggacgtgccctttcacagcagctacgcgcacagccaaagcctggaccggctgatgaaccccctcatcgaccagtacctgtactacctgtctcggactcagtccacgggaggtaccgcaggaactcagcagttgctattttctcaggccgggcctaataacatgtcggctcaggccaaaaactggctacccgggccctgctaccggcagcaacgcgtctccacgacactgtcgcaaaataacaacagcaactttgcttggaccggtgccaccaagtatcatctgaatggcagagactctctggtaaatcccggtgtcgctatggcaacgcacaaggacgacgaagagcgattttttccatccagcggagtcttgatgtttgggaaacagggagctggaaaagacaacgtggactatagcagcgttatgctaaccagtgaggaagaaatcaaaaccaccaacccagtggccacagaacagtacggcgtggtggccgataacctgcaacagcaaaacgccgctcctattgtaggggccgtcaacagtcaaggagccttacctggcatggcctggcagaaccgggacgtgtacctgcagggtcctatctgggccaagattcctcacacggacggcaactttcatccttcgccgctgatgggaggctttggactgaaacacccgcctcctcagatcctgattaagaatacacctgttcccgcggatcctccaactaccttcagtcaagccaagctggcgtcgttcatcacgcagtacagcaccggacaggtcagcgtggaaattgaatgggagctgcagaaagagaacagcaagcgctggaacccagagattcagtatacttccaactactacaaatctacaaatgtggactttgctgtcaatactgagggtacttattcagagcctcgccccattggcacccgttacctcacccgtaacctgtaattgcctgttaatcaataaaccggttaattcgtttcagttgaactttggtctctgcgaagggcgaattc

SEQ ID NO: 4999 - DNA, 3197 bp, Adeno-associated virus
gaattcgccctttctacggctgcgtcaactggaccaatgagaactttcccttcaacgattgcgtcgacaagatggtgatctggtgggaggagggcaagatgacggccaaggtcgtggagtccgccaaggccattctcggcggcagcaaggtgcgcgtggaccaaaagtgcaagtcgtccgcccagatcgaccccacccccgtgatcgtcacctccaacaccaacatgtgcgccgtgattgacgggaacagcaccaccttcgagcaccagcagccgttacaagaccggatgttcaaatttgaactcacccgccgtctggagcacgactttggcaaggtgacaaagcaggaagtcaaagagttcttccgctgggcgcaggatcacgtgaccgaggtggcgcatgagttctacgtcagaaagggtggagccaacaagagacccgcccccgatgacgcggataaaagcgagcccaagcgggcctgcccctcagtcgcggatccatcgacgtcagacgcggaaggagctccggtggactttgccgacaggtaccaaaacaaatgttctcgtcacgcgggcatgcttcagatgctgtttccctgcaagacatgcgagagaatgaatcagaatttcaacatttgcttcacgcacgggaccagagactgttcagaatgtttccccggcgtgtcagaatctcaaccggtcgtcagaaagaggacgtatcggaaactctgtgccattcatcatctgctggggcgggctcccgagattgcttgctcggcctgcgatctggtcaacgtggacctggatgactgtgtttctgagcaataaatgacttaaaccaggtatggctgccgatggttatcttccagattggctcgaggacaacctctctgagggcattcgcgagtggtgggacttgaaacctggagccccgaaacccaaagccaaccagcaaaagcaggacgacggccggggtctggtgcttcctggctacaagtacctcggacccttcaacggactcgacaagggagagccggtcaacgaggcagacgccgcggccctcgagcacgacaaggcctacgacaagcagctcgagcagggggacaacccgtacctcaagtacaaccacgccgacgccgagtttcaggagcgtcttcaagaagatacgtcttttgggggcaacctcgggcgagcagtcttccaggccaagaagcgggttctcgaacctctcggtctggttgaggaaggcgctaagacggctcctggaaagaagagaccggtagagccatcaccccagcgttctccagactcctctacgggcatcggcaagacaggccagcagcccgcgaaaaagagactcaactttgggcagactggcgactcagagtcagtgcccgaccctcaaccaatcggagaaccccccgcaggcccctctggtctgggatctggtacaatggctgcaggcggtggcgctccaatggcagacaataacgaaggcgccgacggagtgggtagttcctcaggaaattggcattgcgattccacatggctgggcgacagagtcatcaccaccagcacccgaacctgggccctccccacctacaacaaccacctctacaagcaaatctccaacgggacatcgggaggaagcaccaacgacaacacctacttcggctacagcaccccctgggggtattttgactttaacagattccactgccacttctcaccacgtgactggcagcgactcatcaacaacaactggggattccggcccaagagactcaacttcaagctcttcaacatccaggtcaaggaggtcacgcagaatgaaggcaccaagaccatcgccaataaccttaccagcacgattcaggtctttacggactcggaataccagctcccgtacgtcctcggctctgcgcaccagggctgcctgcctccgttcccggcggacgtcttcatgattcctcagtacgggtacctgactctgaacaacggcagtcaggccgtgggccgttcctccttctactgcctggagtactttccttctcaaatgctgagaacgggcaacaactttgagttcagctaccagtttgaggacgtgccttttcacagcagctacgcgcacagccaaagcctggaccggctgatgaaccccctcatcgaccagtacctgtactacctgtctcggactcagtccacgggaggtaccgcaggaactcagcagttgctattttctcaggccgggcctaataacatgtcggctcaggccaaaaactggctacccgggccctgctaccggcagcaacgcgtctccacgacactgtcgcaaaataacaacagcaactttgcttggaccggtgccaccaagtatcatctgaatggcagagactctctggtaaatcccggtgtcgctatggcaacgcacaaggacgacgaagagcgattttttccatccagcggagtcttgatgtttgggaaacagggagctggaaaagacaacgtggactatagcagcgttatgctaaccagtgaggaagaaatcaaaaccaccaacccagtggccacagaacagtacggcgtggtggccgataacctgcaacagcaaaacgccgctcctattgtaggggccgtcaacagtcaaggagccttacctggcatggtctggcagaaccgggacgtgtacctgcagggtcctatctgggccaagattcctcacacggacggcaactttcatccttcgccgctgatgggaggctttggactgaaacacccgcctcctcagatcctgattaagaatacacctgttcccgcggatcctccaactaccttcagtcaagccaagctggcgtcgttcatcacgcagtacagcaccggacaggtcagcgtggaaattgaatgggagctgcagaaagagaacagcaagcgctggaacccagagattcagtatacttccaactactacaaatctacaaatgtggactttgctgtcaatactgagggtacttattcagagcctcgccccattggcacccgttacctcacccgtaacctgtaattgcctgttaatcaataaaccggttaattcgtttcagttgaactttggtctctgcgaagggcgaattcgtttaaacctgcaggactagtccctttagtgagggttaattctgagcttggcgtaatcatgggtcatag

SEQ ID NO: 5000 - DNA, 3276 bp, Adeno-associated virus
gaattcgcccttcgcagagaccaaagttcaactgaaacgaattaaccggtttattgattaacaggcaattacaggttacgggtgaggtaacgggtgccaatggggcgaggctcagtataaaccccttcgttgttgacagcaaattccacattattagacttggcataatttgaggtgtactgaatctctggattccagcgtttgctgttttctttctgcagttcccactcgatctccacgctgacctggccggtgctgtactgcgtgataaatgaggcaaacttggcaggagtaaacacctctggaggattagcaggtaccggggtgtttttgatgagaatttgaggaggcgggtgtttgagtccaaatccgtccatcaggggagacgggtgaaagttgccgtccgtgtgaggaattttggcccagatgggaccctgcaggtacacgtcccggttctgccagaccatgccgggcagagccccctggctgttgacagtctgtgtctggggtccggccgtagacgattgcaggttgctggagaccacaccgtattcttctgtagccacgggattggtggttttgatctcctcctcgctggtcattagcacgttttccagcgttgtcttgttggcagcccccgttttgccaaaaaccagcactccgttgatgggaaagaactggtcctcgtcgtccttgttggtggccatggctacgcccgggttggttaatgaatttctaccattcagatggtatttagtggccccggtccaggcaaagttactgttgttgttgctgtctatgttttttgacagtctctgctgccgataacagggtccgggcagccagttctttgattgctcggccatggtgttgggcccagcctgatggaactgcagctcccttgtggaccccgtagtgctctgggtccgggccaggtagtacaggtactggtcgatgaggggattcatcagccggtccaggctctggctatgcgcatagctgctgtggaaaggcacttcctcaaaggtgtagctgaattcaaagttattgcccgttctcagcatctgagaaggaaagtactccaggcagtagaaggaggaacgtcccacagactgactgccgttgtttagagtcagatatccgtactgaggaatcatgaacacgtccgcagggaacggagggaggcagccctggtgcgcagagccgaggacgtacggcagttggtactccgagtccgagaagacctgaatcgtgctggtaaggttattagcgatggtcgtaacgccgtcgtccgtcgtgacctccttgacctggatgttgaacaacttgaaccgcagctttctgggccggaatccccagttgttgttgatgagtcgctgccagtcacgtggtgagaagtggcagtggaatctgttaaagtcaaaatacccccagggggtgctgtagccgaagtaggtgttgtcgttggtgcttcctcccgatgtcccgttggagatttgcttgtagaggtggttgttgtaggtggggagggcccaggttcgggtgctggtggtgatgactctgtcgcccagccatgtggaatcgcaatgccaatttcctgaggaactacccactccgtcggcgccttcgttattgtctgccattggagcgccaccgcctgcagccattgtaccagatcccagaccagaggggcctgcggggggttctccgattggttgagggtcgggcactgactctgagtcgccagtctgcccaaagttgagtctctttttcgcgggctgctggcctgtcttgccgatgcccgtagaggagtctggagaacgctggggtgatggctctaccggtctcttctttccaggagccgtcttagcgccttcctcaaccagaccgagaggttcgagaacccgcttcttggcctggaagactgctcgcccgaggttgcccccaaaagacgtatcttcttgaagacgctcctgaaactcggcgtcggcgtggttgtacttgaggtacgggttgtccccctgctcgagctgcttgtcgtaggccttgtcgtgctcgagggccgcggcgtctgcctcgttgaccggctctcccttgtcgagtccgttgaagggtccgaggtacttgtagccaggaagcaccagaccccggccgtcgtcctgcttttgctggttggctttgggtttcggggctccaggtttcaagtcccaccactcgcgaatgccctcagagaggttgtcctcgagccaatctggaagataaccatcggcagccatacctggtttaagtcatttattgctcagaaacacagtcatccaggtccacgttgaccagatcgcaggccgagcaagcaatctcgggagcccgccccagcagatgatgaatggcacagagtttccgatacgtcctctttctgacgaccggttgagattctgacacgccggggaaacattctgaacagtctctggtcccgtgcgtgaagcaaatgttgaaattctgattcattctctcgcatgtcttgcagggaaacagcatctgaagcatgcccgcgtgacgagaacacttgttttggtacctgtcggcaaagtccaccggagctccttccgcgtctgacgtcgatggatgcaaaatgtcgcaaaagcactcacgtgacagctaatacaggaccactcccctatgacgtgatttacgtcagcgctatgcccgcgtgacgagaacatttgttttggtacctgtcggcaaagtccaccggagctccttccgcgtctgacgtcgatggatccgcgactgaggggcaggcccgcttgggctcgcttttatccgcgtcatcgggggcgggtctcttgttggctccaccctttctgacgtagaactcatgcgccacctcggtcacgtgatcctgcgcccagcggaagaactctttgacttcctgctttgtcaccttgccaaagtcatgctccagacggcgggtgagttcaaatttgaacatccggtcctgcaacggctgctggtgctcgaaggtggtgctgttcccgtcaatcacggcgcacatgttggtgttggaagtgacgatcacgggggtgggatcgatctgggcggaagacttgcacttttggtccacgcgcaccttgctgccgccgagaatggccttggcggactccacgaccttggccgtcatcttgccctcctcccaccagatcaccatcttgtcgacgcaatcgttgaagggaaagttctcattggtccagttgacgcagccgtagaaagggcgaattc

SEQ ID NO: 5001 - protein, 738 aa, Adeno-associated virus; identical to SEQ ID NO: 4777

SEQ ID NO: 5002 - protein, 738 aa, Adeno-associated virus
MAADGYLPDWLEDNLSEGIREWWDLKPGAPKPKANQQKQDDGRGLVLPGYKYLGPFNGLDKGEPVNAADAAALEHDKAYDQQLKAGDNPYLRYNHADAEFQERLQEDTSFGGNLGRAVFQAKKRVLEPLGLVEEGAKTAPGKKRPVEPSPQRSPDSSTGIGKKGHQPARKRLNFGQTGDSESVPDPQPIGEPPAGPSGLGSGTMAAGGGAPMADNNEGADGVGSSSGNWHCDSTWLGDRVITTSTRTWALPTYNNHLYKQISNGTSGGSTNDNTYFGYSTPWGYFDFNRFHCHFSPRDWQRLINNNWGFRPKRLNFKLFNIQVKEVTQNEGTKTIANNLTSTIQVFTDSEYQLPYVPGSAHQGCLPPFPADVFMIPQYGYLTLNNGSQAVGRSSFYCLEYFPSQMLRTGNNFEFSYTFEDVPFHSSYAHSQSLDRLMNPLIDQYLYYLSRTQSTGGTQGTQQLLFSQAGPANMSAQAKNWLPGPCYRQQRVSTTLSQNNNSNFAWTGATKYHLNGRDSLVNPGVAMATHKDDEERFFPSSGVLMFGKQGAGKDNVDYSSVMLTSEEEIKTTNPVATEQYGVVADNLQQTNGAPIVGTVNSQGALPGMVWQNRDVYLQGPIWAKIPHTDGNFHPSPLMGGFGLKHPPPQILIKNTPVPADPPTTFSQAKLASFITQYSTGQVSVEIEWELQKENSKRWNPEIQYTSNYYKSTNVDFAVNTEGTYSEPRPIGTRYLTRNL

SEQ ID NO: 5003 - protein, 738 aa, Adeno-associated virus; identical to SEQ ID NO: 4775

SEQ ID NO: 5004 - DNA, 2489 bp, Adeno-associated virus
gaattcgccctttctacggctgcgtcaactggaccaatgagaactttcccttcaacgattgcgtcgacaagatggtgatctggtgggaggagggcaagatgacggccaaggtcgtgaagtccgccaaggccattcatcatctgctggggcgggctcccgagattgcttgctcggcctgcgatctggtcaacgtggacctggatgactgtgtttctgagcaataaatgacttaaaccaggtatggctgccgatggttatcttccagattggctcgaggacaacctctctgagggcattcgcgagtggtgggacttgaaacctggagccccgaaacccaaagccaaccagcaaaagcaggacgacggccggggtctggtgcttcctggctacaagtacctcggacccttcaacggactcgacaagggagagccggtcaacgaggcagacgccgcggccctcgagcacgacaaggcctacgacaagcagctcgagcagggggacaacccgtacctcaagtacaaccacgccgacgccgagtttcaggagcgtcttcaagaagatacgtcttttgggggcaacctcgggcgagcagtcttccaggccaagaagcgggttctcgaacctctcggtctggttgaggaaggcgctaagacggctcctggaaagaagagacccatagaatcccccgactcctccacgggcatcggcaggaaaggccagcagcccgctaaaaagaagctcaactttgggcagactggcgactcagagtcagtgcccgaccctcaaccaatcggagaaccccccgcaggcccctctggtctgggatctggtacaatggctgcaggcggtggcgctccaatggcagacaataacgaaggcgccgacggagtgggtaatgcctccggaaattggcattgcgattccacatggctgggcgacagagtcatcaccaccagcacccgcacctgggccctgcccacctacaacaaccacctctacaagcagatatcaagtcagagcggggctaccaacgacaaccacttcttcggctacagcaccccctggggctattttgacttcaacagattccactgccacttctcaccacgtgactggcagcgactcatcaacaacaactggggattccggcccagaaagctgcggttcaagttgttcaacatccaggtcaaggaggtcacgacgaacgacggcgttacgaccatcgccaataaccttaccagcacgattcaggtcttctcggactcggagtaccaactgccgtacgtcctcggctctgcgcaccagggctgcctccctccgttccctgcggacgtgttcatgattcctcagtacggatatctgactctaaacaacggcagtcagtctgtgggacgttcctccttctactgcctggagtactttccttctcagatgctgagaacgggcaataactttgaattcagctacacctttgaggaagtgcctttccacagcagctatgcgcacagccagagcctggaccggctgatgaatcccctcatcgaccagtacctgtactacctggcccggacccagagcactacggggtccacaagggagctgcagttccatcaggctgggcccaacaccatggccgagcaatcaaagaactggctgcccggaccctgttatcggcagcagagactgtcaaaaaacatagacagcaacaacaacagtaactttgcctggaccggggccactaaataccatctgaatggtagaaattcattaaccaacccgggcgtagccatggccaccaacaaggacgacgaggaccagttctttcccatcaacggagtgctggtttttggcaaaacgggggctgccaacaagacaacgctggaaaacgtgctaatgaccagcgaggaggagatcaaaaccaccaatcccgtggctacagaagaatacggtgtggtctccagcaacctgcaatcgtctacggccggaccccagacacagactgtcaacagccagggggctctgcccggcatggtctggcagaaccgggacgtgtacctgcagggtcccatctgggccaaaattcctcacacggacggcaactttcacccgtctcccctgatgggcggatttggactcaaacacccgcctcctcaaattctcatcaaaaacaccccggtacctgctaatcctccagaggtgtttactcctgccaagtttgcctcatttatcacgcagtacagcaccggccaggtcagcgtggagatcgagtgggaactgcagaaagaaaacagcaaacgctggaatccagagattcagtacacctcaaattatgccaagtctaataatgtggaatttgctgtcaacaacgaaggggtttatactgagcctcgccccattggcacccgttacctcacccgtaacctgtaattgcctgttaatcaataaaccggttaattcgtttcagttgaactttggtcaagggcgaattc

SEQ ID NO: 5005 - DNA, 3098 bp, Adeno-associated virus
gaattcgccctttctacggctgcgtcaactggaccaatgagaactttcccttcaacgattgcgtcgacaagatggtgatctggtgggaggagggcaagatgacggccaaggtcgtggagtccgccaaggccattctcggcggcagcaaggtgcgcgtggaccaaaagtgcaagtcttccgcccagatcgatcccacccccgtgatcgtcacttccaacaccaacatgtgcgccgtgattgacgggaacagcaccaccttcgagcaccagcagccgttacaagaccggatgttcaaatttgaactcacccgccgtctggagcacgactttggcaaggtgacaaagcaggaagtcaaagagttcttccgctgggcgcaggatcacgtgaccgaggtggcgcatgagttctacgtcagaaagggtggagccaacaagagacccgcccccgatgacgcggataaaagcgagcccaagcgggcctgcccctcagtcgcggatccatcgacgtcagacgcggaaggagctccggtggactttgccgacaggtaccaaaacaaatgttctcgtcacgcgggcatgcttcagatgctgtttccctgcaagacatgcgagagaatgaatcagaatttcaacatttgcttcacgcacgggaccggagactgttcagaatgtttccccggcgtgtcagaatctcaaccggtcgtcagaaagaggacgtatcggaaactctgtgccattcatcatctgctggggcgggctcccgagattgcttgctcggcctgcgatctggtcaacgtggacctggatgactgtgtttctgagcaataaatgacttaaaccaggtatggctgccgatggttatcttccagattggctcgaggacaacctctctgagggcattcgcgagtggtgggacttgaaacctggagccccgaaacccaaagccaaccagcaaaagcaggacgacggccggggtctggtgcttcctggctacaagtacctcggacccttcaacggactcgacaagggagagccggtcaacgcggcggacgcagcggccctcgagcacgacaaggcctacgaccagcagctcaaagcgggtgacaatccgtacctgcggtataaccacgccgacgccgagtttcaggagcgtcttcaagaagatacgtcttttgggggcaacctcgggcgagcagtcttccaggccaagaagcgggttctcgaacctctcggtctggttgaggaaggcgctaagacggctcctggaaagaagagacccatagaatcccccgactcctccacgggcatcggcaagaaaggccagcagcccgctaaaaagaagctcaactttgggcagactggcgactcagagtcagtgcccgaccctcaaccaatcggagaaccccccgcaggcccctctggtctgggatctggtacaatggctgcaggcggtggcgctccaatggcagacaataacgaaggcgccgacggagtgggtaatgcctccggaaattggcattgcgattccacatggctgggcgacagagtcatcaccaccagcacccgcacctgggccctgcccacctacaacaaccacctctacaagcagatatcaagtcagagcggggctaccaacgacaaccacttcttcggctacagcaccccctggggctattttgacttcaacagattccactgccacttctcaccacgtgactggcagcgactcatcaacaacaactggggattccggcccagaaagctgcggttcaagttgttcaacatccaggtcaaggaggtcacgacgaacgacggcgttacgaccatcgctaataaccttaccagcacgattcaggtcttctcggactcggagtaccaactgccgtacgtcctcggctctgcgcaccagggctgcctccctccgttccctgcggacgtgttcatgattcctcagtacggatatctgactctaaacaacggcagtcagtctgtgggacgttcctccttctactgcctggagtactttccttctcagatgctgagaacgggcaataactttgaattcagctacacctttgaggaagtgcctttccacagcagctatgcgcacagccagagcctggaccggctgatgaatcccctcatcgaccagtacctgtactacctggcccggacccagagcactacggggtccacaagggagctgcagttccatcaggctgggcccaacaccatggccgagcaatcaaagaactggctgcccggaccctgttatcggcggcagagactgtcaaaagacatagacagcaacaacaacagtaactttgcctggaccggggccactaaataccatctgaatggtagaaattcattaaccaacccgggcgtagccatggccaccaacaaggacgacgaggaccagttctttcccatcaacggagtgctggtttttggcaaaacgggggctgccaacaagacaacgctggaaaacgtgctaatgaccagcgaggaggagatcaaaaccaccaatcccgtggctacagaagaatacggtgtggtctccagcaacctgcaatcgtctacggccggaccccagacacagactgtcaacagccagggggctctgcccggcatggtctggcagaaccgggacgtgtacctgcagggtcccatctgggccaaaattcctcacacggacggcaactttcacccgtctcccctgatgggcggatttggactcaaacacccgcctcctcaaattctcatcaaaaacaccccggtacctgctaatcctccagaggtgtttactcctgccaagtttgcctcatttatcacgcagtacagcaccggccaggtcagcgtggagatcgagtgggaactgcagaaagagaacagcaaacgctggaatccagagattcagtacacctcaaattatgccaagtctaataatgtggaatttgctgtcaacaacgaaggggtttatactgagcctcgccccattggcacccgttacctcacccgtaacctgtaattacttgttaatcaataaaccggttgattcgtttcagttgaactttggtctctgcgaagggcgaattc

SEQ ID NO: 5006 - DNA, 2969 bp, Adeno-associated virus
gaattcgccctttctacggctgcgtcaactggaccaatgagaactttcccttcaacgattgcgtcgacaagatggtgatctggtgggaggagggcaagatgacggccaaggtcgtggagtccgccaaggccattctcggcggcagcaaggtgcgcgtggaccaaaagtgcaagtcgtccgcccagatcgaccccacccccgtgatcgtcacctccaacaccaacatgtgcgccgtgattgacgggaacagcaccaccttcgagcaccagcagccgttacaagaccggatgttcaaatttgaactcacccgccgtctggagcacgactttggcaaggtgacaaagcaggaagtcaaagagttcttccgctgggcgcaggatcacgtgaccgaggtggcgcatgagttctacgtcagaaagggtggagccaacaagagacccgcccccgatgacgcggataaaagcgagcccaagcgggcctgcccctcagtcgcggatccatcgacgtcagacgcggaaggagctccggtggactttgccgacaggtaccaaaacaaatgttctcgtcacgcgggcatgcttcagatgctgtttccctgcaagacatgcgagagaatgaatcagaatttcaacatttgcttcacgcacgggaccagagactgttcagaatgtttccccggcgtgtcagaatctcaaccggtcgtcagaaagaggacgtatcggaaactctgtgccattcatcatctgctggggcgggctcccgagattgcttgctcggcctgcgatctggtcaacgtggacctggatgactgtgtttctgagcaataaatgacttaaaccaggtatggctgccgatggttatcttccagattggctcgaggacaacctctctgagggcatccgcgagtggtgggacttgaaacctggagccccgaaacccaaagccaaccagcaaaagcaggacgacggccggggtctggtgcttcctggctacaagtacctcggacccttcaacggactcgacaagggagagccggtcaacgaggcagacgccgcggccctcgagcacgacaaggcctacgacaagcagctcgagcagggggacaacccgtacctcaagtacaaccacgccgacgccgagtttcaggagcgtcttcaagaagatacgtcttttgggggcaacctcgggcgagcagtcttccaggccaagaagcgggttctcgaacctctcggtctggttgaggaaggcgctaagacggctcctggaaagaagagaccggtagagccatcaccccagcgttctccagactcctctacgggcatcggcaagacaggccagcagcccgcgaaaaagagactcaactttgggcagactggcgactcagagtcagtgcccgaccctcaaccaatcggagaaccccccgcaggcccctctggtctgggatctggtacaatggctgcaggcggtggcgctccaatggcagacaataacgaaggcgccgacggagtgggtagttcctcaggaaattggcattgcgattccacatggctgggcgacagagtcatcaccaccagcacccgaacctgggccctccccacctacaacaaccacctctacaagcaaatctccaacgggacatcgggaggaagcaccaacgacaacacctacttcggctacagcaccccctgggggtattttgactttaacagattccactgccacttctcaccacgtgactggcagcgactcatcaacaacaactggggattccggcccaagagactcaacttcaagctcttcaacatccaggtcaaggaggtcacgcagaatgaaggcaccaagaccatcgccaataaccttaccagcacgattcaggtctttacggactcggaataccagctcccgtacgtcctcggctctgcgcaccagggctgcctgcctccgttcccggcggacgtcttcatgattcctcagtacgggtacctgactctgaacaacggcagtcaggccgtgggccgttcctccttctactgcctggagtactttccttctcaaatgctgagaacgggcaacaactttgagttcagctaccagtttgaggacgtgccttttcacagcagctacgcgcacagccaaagcctggaccggctgacgaaccccctcatcgaccagtacctgtactacctggcccggacccagagcactacggggtccacaagggggctgcagttccatcaggctgggcccaacaccatggccgagcaatcaaagaactggctgcccggaccctgttatcggcagcagagactgtcaaaaaacatagacagcaacaacaacagtaactttgcctggaccggggccactaaataccatctgaatggtagaaattcattaaccaacccgggcgtagccatggccaccaacaaggacgacgaggaccagttctttcccatcaacggagtgctggtttttggcaaaacgggggctgccaacaagacaacgctggaaaacgtgctaatgaccagcgaggaggagatcaaaaccaccaatcccgtggctacagaagaatacggtgtggtctccagcaacctgcaatcgtctacggccggaccccagacacagactgtcaacagccagggggctctgcccggcatggtctggcagaaccgggacgtgtacctgcagggtcccatctgggccaaaattcctcacacggacggcaactttcacccgtctcccctgatgggcggatttggactcaaacacccgcctcctcaaattctcatcaagtatacttccaactactacaaatctacaaatgtggactttgctgtcaatactgagggtacttattcagagcctcgccccattggcacccgttacctcacccgtaacctgtaattgcctgttaatcaataaaccggttaattcgtttcagttgaactttggtctctgcgaagggcgaattc

SEQ ID NO: 5007 - DNA, 3113 bp, Adeno-associated virus
gaattcgccctttctacggctgcgtcaactggaccaatgagaactttcccttcaacgattgcgtcgacaagatggtgatctggtgggaggagggcaagatgacggccaaggtcgtggagtccgccaaggccattctcggcggcagcaaggtgcgcgtggaccaaaagtgcaagtcgtccgcccagatcgatcccacccccgtgatcgtcacttccaacaccaacatgtgcgccgtgattgacgggaacagcaccaccttcgagcaccagcagccgttacaagaccggatgttcaaatttgaactcacccgccgtctggagcatgactttggcaaggtgacaaagcaggaagtcaaagagttcttccgctgggcgcaggatcacgtgaccgaggtggcgcatgagttctacgtcagaaagggtggagccaacaagagacccgcccccgatgacgcggataaaagcgagcccaagcgggcctgcccctcagtcgcggatccatcgacgtcagacgcggaaggagctccggtggactttgccgacaggtaccaaaacaaatgttctcgtcacgcgggcatgcttcagatgctgtttccctgcaagacatgcgagagaatgaatcagaatttcaacatttgcttcacgcacgggaccagagactgttcagaatgtttccccggcgtgtcagaatctcaaccggtcgtcagaaagaggacgtatcggaaactctgtgccattcatcatctgctggggcgggctcccgagattgcttgctcggcctgcgatctggtcaacgtggacctggatgactgtgtttctgagcaataaatgacttaaaccaggtatggctgccgatggttatcttccagattggctcgaggacaacctctctgagggcattcgcgagtggtgggacttgaaacctggagccccgaaacccaaagccaaccagcaaaagcaggacgacggccggggtctggtgcttcctggctacaagtacctcggacccttcaacggactcgacaagggggagcccgtcaacgcggcggacgcagcggccctcgagcacgacaaggcctacgaccagcagctcaaagcgggtgacaatccgtacctgcggtataaccacgccgacgccgagtttcaggagcgtcttcaagaagatacgtcttttgggggcaacctcgggcgagcagtcttccaggccaagaagcgggttctcgaacctctcggtctggttgaggaaggcgctaagacggctcctggaaagaagagacccatagaatcccccgactcctccacgggcatcggcaagaaaggccagcagcccgctaaaaagaagctcaactttgggcagactggcgactcagagtcagtgcccgaccctcaaccaatcggagaaccccccgcaggcccctctggtctgggatctggtacaatggctgcaggcggtggcgctccaatggcagacaataacgaaggcgccgacggagtgggtagttcctcaggaaattggcattgcgattccacatggctgggcgacagagtcatcaccaccagcacccgaacctgggccctccccacctacaacaaccacctctacaagcaaatctccaacgggacatcgggaggaagcaccaacgacaacacctacttcggctacagcaccccctgggggtattttgactttaacagattccactgccacttctcaccacgtgactggcagcgactcatcaacaacaactggggattccggcccaagagactcaacttcaagctcttcaacatccaggtcaaggaggtcacgcagaatgaaggcaccaagaccatcgccaataaccttaccagcacgattcaggtctttacggactcggaataccagctcccgtacgtcctcggctctgcgcaccagggctgcctgcctccgttcccggcggacgtcttcatgattcctcagtacgggtacctgactctgaacaacggcagtcaggccgtgggccgttcctccttctactgcctggagtactttccttctcaaatgctgagaacgggcaacaactttgagttcagctaccagtttgaggacgtgccttttcacagcagctatgcgcacagccaaagcctggaccggctgatgaaccccctcatcgaccagtacctgtactacctgtctcggactcagtccacgggaggtaccgcaggaactcagcagttgctattttctcaggccgggcctaataacatgtcggctcaggccaaaaactggctacccgggccctgctaccggcagcaacgcgtctccacgacagtgtcgcaaaataacaacagcaactttgcttggaccggtgccaccaagtatcatctgaatggcagagactctctggtaaatcccggtgtcgctatggcaacgcacaagggcgacgaagagcgattttttccatccagcggagtcttgatgtttgggaaacagggagctggaaaagacaacgtggactatagcagcgttatgctaaccagtgaggaagaaatcaaaaccaccaacccagtggccacagaacagtacggcgtggtggccgataacctgcaacagcaaaacgccgctcctattgtaggggccgtcaacagtcaaggagccttacctggcatggtctggcagaaccgggacgtgtacctgcagggtcctatctgggccaagattcctcacacggacggcaactttcatccttcgccgctgatgggaggctttggactgaaacacccgcctcctcagatcctgattaagaatacacctgttcccgcggatcctccaactaccttcagtcaagccaagctggcgtcgttcatcacgcagtacagcaccggacaggtcagcgtggaaattgaatgggagctgcagaaagagaacagcaagcgctggaacccagagattcagtatacttccaactactacaaatctacaaatgtggactttgctgtcaatactgagggtacttattcagagcctcgccccattggcacccgttacctcacccgtagcctgtaattgcctgttaatcaataaaccggttgattcgtttcagttgaactttggtctctgcgaagggcgaattc

SEQ ID NO: 5008 - DNA, 3128 bp, Adeno-associated virus
gaattcgccctttctacggctgcgtcaactggaccaatgagaactttcccttcaacgattgcgtcgacaagatggtgatctggtgggaggagggcaagatgacggccaaggtcgtggagtccgccaaggccattctcggcggcagcaaggtgcgcgtggaccaaaagtgcaagtcgtccgcccagatcgaccccacccccgtgatcgtcacctccaacaccaacatgtgcgccgtgattgacgggaacagcaccaccttcgagcaccagcagccgttgcaggaccggatgttcaaatttgaactcacccgccgtctggagcatgactttggcaaggtgacaaagcaggaagtcaaagagttcttccgctgggcgcaggatcacgtgaccgaggtggcgcatgagttctacgtcagaaagggtggagccaacaagagacccgcccccgatgacgcggataaaagcgagcccaagcgggcctgcccctcagtcgcggatccatcgacgtcagacgcggaaggagctccggtggactttgccgacaggtaccaaaacaaatgttctcgtcacgcgggcatgcttcagatgctgtttccctgcaagacatgcgagagaatgaatcagaatttcaacatttgcttcacgcgcgggaccagagactgttcagaatgtttcccgggcgtgtcagaatctcaaccggtcgtcagaaagaggacgtatcggaaactctgtgccattcatcatctgctggggcgggctcccgagattgcttgctcggcctgcgatctggtcaacgtggacctggatgactgtgtttctgagcaataaatgacttaaaccaggtatggctgccgatggttatcttccagattggctcgaggacaacctctctgagggcattcgcgagtggtgggacttgaaacctggagccccgaaacccaaagccaaccagcaaaagcaggacgacggccggggtctggtgcttcctggctacaagtacctcggacccttcaacggactcgacaagggggagcccgtcaacgcggcggacgcagcggccctcgagcacgacaaggcctacgaccagcagctcaaagcgggtgacaatccgtacctgcggtataaccacgccgacgccgagtttcaggagcgtctgcaagaagatacgtcttttgggggcaacctcgggcgagcagtcttccaggccaagaagcgggttctcgaacctctcggtctggttgaggaaggcgctaagacggctcctggaaagaagagaccggtagagccatcaccccagcgttctccagactcctctacgggcatcggcaagacaggccagcagcccgcgaaaaagagactcaactttgggcagactggcgactcagagtcagtgcccgaccctcaaccaatcggagaaccccccgcaggcccctctggtctgggatctggtacaatggctgcaggcggtggcgctccaatggcagacaataacgaaggcgccgacggagtgggtagttcctcaggaaattggcattgcgattccacatggctgggcgacagagtcatcaccaccagcacccgaacctgggccctccccacctacaacaaccacctctacaagcaaatctccaacgggacatcgggaggaagcaccaacgacaacacctacttcggctacagcaccccctgggggtattttgactttaacagattccactgccacttctcaccacgtgactggcagcgactcatcaacaacaactggggattccggcccaagagactcaacttcaagctcttcaacatccaggtcaaggaggtcacgcagaatgaaggcaccaagaccatcgccaataaccttaccagcacgattcaggtctttacggactcggaataccagctcccgtacgtcctcggctctgcgcaccagggctgcccgcctccgttcccggcggacgtcttcatgattcctcagtacgggtacctgactctgaacaacggcagtcaggccgtgggccgttcctccttctactgcctggagtactttccttctcaaatgcggagaacgggcaacaactttgagttcagctaccagtttgaggacgtgccttttcacagcagctacgcgcatagccaaagcctggaccggctgatgaaccccctcatcgaccagtacctgtactacctgtctcggactcagtccacgggaggtaccgcaggaactcagcagttgctattttctcaggccgggcctaataacatgtcggctcaggccaaaaactggctacccgggccctgctaccggcagcaacgcgtctccacgacactgtcgcaaaataacaacagcaactttgcttggaccggtgccaccaagtatcatctgaatggcagagactctctggtaaatcccggtgtcgctatggcaacgcacaaggacgacgaagagcgattttttccatccagcggagtcttgatgtttgggaaacagggagctggaaaagacaacgtggactatagcagcgttatgctaaccagtgaggaagaaatcaaaaccaccaacccagtggccacagaacagtacggcgtggtggccgataacctgcaacagcaaaacgccgctcctattgtaggggccgtcaacagtcaaggagccttacctggcatggtctggcagaaccgggacgtgtacctgcagggtcctatctgggccaagattcctcacacggacggcaactttcatccttcgccgctgatgggaggctttggactgaaacacccgcctcctcagatcctgattaagaatacacctgttcccgcggatcctccaactaccttcagtcaagccaagctggcgtcgttcatcacgcagtacagcaccggacaggtcagcgtggaaattgaatgggagctgcagaaagagaacagcaagcgctggaacccagagattcagtatacttccaactactacaaatctacaaatgtggactttgctgtcaatactgagggtacttattcagagcctcgccccattggcacccgttacctcacccgtaacctgtaattgcctgttaatcaataaaccggttaattcgtttcagttgaactttggtctctgcgaagggcgaattc

SEQ ID NO: 5009 - protein, 738 aa, Adeno-associated virus; identical to SEQ ID NO: 5002

SEQ ID NO: 5010 - DNA, 1933 bp, Adeno-associated virus
  modified_base (1302)..(1302): a, c, t or g
caaggcctacgaccagcagctcaaagcgggtgacaatccgtacctgcggtataaccacgccgacgccgagtttcaggagcgtcttcaagaagatacgtcttttgggggcaacctcgggcgagcagtcttccaggccaaaaagcgggttctcgaacctcttggtctggttgagacgccagctaagacggcacctggaaagaagcgaccggtagactcgccagactccacctcgggcatcggcaagaaaggccagcagcccgcgaaaaagagactcaactttgggcagactggcgactcagagtcagtccccgaccctcaaccaatcggagaaccaccagcaggcccctctggtctgggatctggtacaatggctgcaggcggtggcgcaccaatggctgacaataacgagggcgccgacggagtgggtaatgcctcaggaaattggcattgcgattccacatggctgggcgacagagtcatcaccaccagcacccgaacctgggccctgcccacctacaacaaccacctctacaagcaaatctccagtcagtcagcagggagcaccaacgataacgtctatttcggctacagcaccccctgggggtattttgacttcaacagattccattgccacttctcaccacgtgactggcagcgacttatcaacaacaactggggattccggcccaagaagctcaacttcaagctcttcaacatccaggtcaaggaggtcacgacgaatgacggtgtcacaaccatcgctaataaccttaccagcacggttcaggtcttttcggactcggaatatcaactgccgtacgtcctcggctccgcgcaccagggctgcctgcctccgttcccggcagacgtgttcatgattccgcagtacggatacctgactctgaacaatggcagccaatcggtaggccgttcctccttctactgcctggagtactttccttctcagatgctgagaacgggcaacaacttcacctttagctacaccttcgaggacgtgcctttccacagcagctacgcgcacagccagagtctggaccggctgatgaatcccctcatcgaccagtacctgtactacttggccagaacacagagcaacgcaggaggtactgctggcaatcgggaactgcagttttatcagggcggacctaccaccatggccgaacaagcaaagaactggctgcccggaccttgcttccggcaacagagagtatccaagacgctggatcaaaataacaacagcaactttgcctggactggtgccacaaaataccatttaaatgnaagaaattcattggttaatcccggtgtcgccatggcaacccacaaggacgacgaggaacgcttcttcccttcgagcggagttctaatttttggcaaaactggagcagctaataaaactacattagaaaacgtgctcatgacaaatgaagaagaaattcgtcctaccaacccggtagctaccgaggaatacgggattgtaagcagcaacttgcaggcggctagcaccgcagcccagacacaagttgttaacaaccagggagccttacctggcatggtctggcagaaccgggacgtgtacctgcaaggtcccatttgggccaagattcctcacacggacggcaactttcacccgtctcctctaatgggtggctttggactgaaacacccgcctccccagatcctgatcaaaaacacaccggtacctgctaatcctccagaagtgtttactcctgccaagtttgcttccttcatcacgcagtacagcaccgggcaagtcagcgttgagatcgagtgggagctgcagaaagagaacagcaagcgctggaacccagagattcagtacacctccaactttgacaaacagactggagtggactttgctgttgacagccagggtgtttactctgagcct

SEQ ID NO: 5011 - DNA, 3105 bp, Adeno-associated virus
gaattcgcccttgctgcgtcaactggaccaatgagaactttcccttcaacgattgcgtcgacaagatggtgatctggtgggaggagggcaagatgaccgccaaggtcgtggagtccgccaaggccattctgggcggaagcaaggtgcgcgtggaccaaaagtgcaagtcatcggcccagatcgaccccacgcccgtgatcgtcacctccaacaccaacatgtgcgccgtgatcgacgggaacagcaccaccttcgagcaccagcagccgctgcaggaccgcatgttcaagttcgagctcacccgccgtctggagcacgactttggcaaggtgaccaagcaggaagtcaaagagttcttccgctgggctcaggatcacgtgactgaggtggcgcatgagttctacgtcagaaagggcggagccaccaaaagacccgcccccagtgacgcggatataagcgagcccaagcgggcctgcccctcagttgcggagccatcgacgtcagacgcggaagcaccggtggactttgcggacaggtaccaaaacaaatgttctcgtcacgcgggcatgcttcagatgctgtttccctgcaagacatgcgagagaatgaatcagaatttcaacgtctgcttcacgcacggggtcagagactgctcagagtgcttccccggcgcgtcagaatctcaacccgtcgtcagaaaaaagacgtatcagaaactgtgcgcgattcatcatctgctggggcgggcacccgagattgcgtgttcggcccgcgatctcgtcaacgtggacttggatgactgtgtttctgagcaataaatgacttaaaccaggtatggctgctgacggttatcttccagattggctcgaggacaacctctctgagggcattcgcgagtggtgggacctgaaacctggagcccccaagcccaaggccaaccagcagaagcaggacgacggccggggtctggtgcttcctggctacaagtacctcggacccttcaacggactcgacaagggggagcccgtcaacgcggcggacgcagcggccctcgagcacgacaaggcctacgaccagcagctcaaagcgggtgacaatccgtacctgcggtataaccacgccgacgccgagtttcaggagcgtctgcaagaagatacgtcttttgggggcaacctcgggcgagcagtcttccaggccaagaagagggtactcgaacctctgggcctggttgaagaaggtgctaagacggctcctggaaagaagagaccgttagagtcaccacaagagcccgactcctcctcaggaatcggcaaaaaaggcaaacaaccagccaaaaagagactcaactttgaagaggacactggagccggagacggaccccctgaaggatcagataccagcgccatgtcttcagacattgaaatgcgtgcagcaccgggcggaaatgctgtcgatgcgggacaaggttccgatggagtgggtaatgcctcgggtgattggcattgcgattccacctggtctgagggcaaggtcacaacaacctcgaccagaacctgggtcttgcccacctacaacaaccacttgtacctgcggctcggaacaacatcaaacagcaacacctacaacggattctccaccccctggggatactttgactttaacagattccactgtcacttctcaccacgtgactggcaaagactcatcaacaacaactggggactacgaccaaaagccatgcgcgttaaaatcttcaatatccaagttaaggaggtcacaacgtcgaacggcgagactacggtcgctaataaccttaccagcacggttcagatatttgcggactcgtcgtatgagctcccgtacgtgatggacgctggacaagagggaagtctgtctcctttccccaatgacgtcttcatggtgcctcaatatggctactgtggcattgtgactggcgaaaatcagaaccagacggacagaaatgctttctactgcctggagtattttccttcacaaatgctgagaactggcaataactttgaaatggcttacaactttgggaaggtgccgttccactcaatgtatgcttacagccagagcccggacagactgatgaatcccctcctggaccagtacctgtggcacttacagtcgaccacctctggagagactctgaatcaaggcaatgcagcaaccacatttggaaaaatcaggagtggagactttgccttttacagaaagaactggctgcctgggccttgtgttaaacagcagagactctcaaaaactgccagtcaaaattacaagattcctgccagcgggggcaacgctctgttaaagtatgacacccactataccttaaacaaccgctggagcaacatagcgcctggacctccaatggcaacagctggaccttcagatggggacttcagcaacgcccagctcatcttccctggaccatcagtcaccggaaacacaacaacctcagcaaacaatctgttgtttacatcagaagaagaaattgctgccaccaacccaagagacacggacatgtttggtcagattgctgacaataatcagaatgctacaactgctcccataaccggcaacgtgactgctatgggagtgcttcctggcatggtgtggcaaaacagagacatttactaccaagggccaatttgggccaagatcccacacgcggacggacattttcatccttcaccgctaattggcggttttggactgaaacatccgcctccccagatatttatcaaaaacacccccgtacctgccaatcctgcgacaaccttcactgcagccagagtggactctttcatcacacaatacagcaccggccaggtcgctgttcagattgaatgggaaatcgaaaaggaacgctccaaacgctggaatcctgaagtgcagtttacttcaaactatgggaaccagtcttctatgttgtgggctcccgatacaactgggaagtatacagagccgcgggttattggctctcgttatttgactaatcatttgtaactgcctagttaatcaataaaccgtgtgattcgtttcagttgaactttggtctctgcgaagggcgaattc

SEQ ID NO: 5012 - protein, 733 aa, Adeno-associated virus
MAADGYLPDWLEDNLSEGIREWWDLKPGAPKPKANQQKQDDGRGLVLPGYKYLGPFNGLDKGEPVNAADAAALEHDKAYDQQLKAGDNPYLRYNHADAEFQERLQEDTSFGGNLGRAVFQAKKRVLEPLGLVEEGAKTAPGKKRPLESPQEPDSSSGIGKKGKQPAKKRLNFEEDTGAGDGPPEGSDTSAMSSDIEMRAAPGGNAVDAGQGSDGVGNASGDWHCDSTWSEGKVTTTSTRTWVLPTYNNHLYLRLGTTSNSNTYNGFSTPWGYFDFNRFHCHFSPRDWQRLINNNWGLRPKAMRVKIFNIQVKEVTTSNGETTVANNLTSTVQIFADSSYELPYVMDAGQEGSLPPFPNDVFMVPQYGYCGIVTGENQNQTDRNAFYCLEYFPSQMLRTGNNFEMAYNFEKVPFHSMYAHSQSLDRLMNPLLDQYLWHLQSTTSGETLNQGNAATTFGKIRSGDFAFYRKNWLPGPCVKQQRFSKTASQNYKIPASGGNALLKYDTHYTLNNRWSNIAPGPPMATAGPSDGDFSNAQLIFPGPSVTGNTTTSANNLLFTSEEEIAATNPRDTDMFGQIADNNQNATTAPITGNVTAMGVLPGMVWQNRDIYYQGPIWAKIPHADGHFHPSPLIGGFGLKHPPPQIFIKNTPVPANPATTFTAARVDSFITQYSTGQVAVQIEWEIEKERSKRWNPEVQFTSNYGNQSSMLWAPDTTGKYTEPRVIGSRYLTNHL

SEQ ID NO: 5013 - DNA, 3105 bp, Adeno-associated virus
gaattcgcccttgctgcgtcaactggaccaatgagaactttcccttcaacgattgcgtcgacaagatggtgatctggtgggaggagggcaagatgaccgccaaggtcgtggagtccgccaaggccattctgggcggaagcaaggtgcgcgtggaccaaaagtgcaagtcatcggcccagatcgaccccacgcccgtgatcgtcacctccaacaccaacatgtgcgccgtgatcgacgggaacagcaccaccttcgagcaccagcagccgctgcaggaccgcatgttcaagttcgagctcacccgccgtctggagcacgactttggcaaggtgaccaagcaggaagtcaaagagttcttccgctgggctcaggatcacgtgactgaggtggcgcatgagttctacgtcagaaagggcggagccaccaaaagacccgcccccagtgacgcggatataagcgagcccaagcgggcctgcccctcagttgcggagccatcgacgtcagacgcggaagcaccggtggactttgcggacaggtaccaaaacaaatgttctcgtcacgcgggcatgcttcagatgctgtttccctgcaagacatgcgagagaatgaatcagaatttcaacgtctgcttcacgcacggggtcagagactgctcagagtgcttccccggcgcgtcagaatctcaacccgtcgtcagaaaaaagacgtatcagaaactgtgcgcgattcatcatctgctggggcgggcacccgagattgcgtgttcggcctgcgatctcgtcaacgtggacttggatgactgtgtttctgagcaataaatgacttaaaccaggtatggctgctgacggttatcttccagattggctcgaggacaacctctctgagggcattcgcgagtggtgggacctgaaacctggagcccccaagctcaaggccaaccagcagaagcaggacgacggccggggtctggtgcttcctggctacaagtacctcggacccttccacggactcgacaagggggagcccgtcaacgcggcggacgcagcggccctcgagcacgacaaggcctacgaccagcagctcaaagcgggtgacaatccgtacctgcggtataaccacgccgacgccgagtttcaggagcgtctgcaagaagatacgtcttttgggggcaacctcgggcgagcagtcttccaggccaagaagagggtactcgaaccactgggcctggttgaagaaggtgctaagacggctcctggaaagaagagaccgttagagtcaccacaagagcccgactcctcctcaggaatcggcaaaaaaggcaaacaaccagccaaaaagagactcaactttgaagaggacactggagccggagacggaccccctgaaggatcagataccagcgccatgtcttcagacattgaaatgcgtgcagcaccgggcggaaatgctgtcgatgcgggacaaggttccgatggagtgggtaatgcctcgggtgattggcattgcgattccacctggtctgagggcaaggtcacaacaacctcgaccagaacctgggtcttgcccacctacaacaaccacttgtacctgcggctcggaacaacatcaaacagcaacacctacaacggattctccaccccctggggatactttgactttaacagattccactgtcacttctcaccacgtgactggcaaagactcatcaacaacaactggggactacgaccaaaagccatgcgcgttaaaatcttcaatatccaagttaaggaggtcacaacgtcgaacggcgagactacggtcgctaataaccttaccagcacggttcagatatttgcggactcgtcgtatgagctcccgtacgtgatggacgctggacaagagggaagtctgcctcctttccccaatgacgtcttcatggtgcctcaatatggctactgtggcattgtgactggcgaaaatcagaaccagacggacagaaatgctttctactgcctggagtattttccttcacaaatgctgagaactggcaataactttgaaatggcttacaactttgagaaggtgccgttccactcaatgtatgctcacagccagagcctggacagactgatgaatcccctcctggaccagtacctgtggcacttacagtcgaccacctctggagagactctgaatcaaggcaatgcagcaaccacatttggaaaaatcaggagtggagactttgccttttacagaaagaactggctgcctgggccttgtgttaaacagcagagattctcaaaaactgccagtcaaaattacaagattcctgccagcgggggcaacgctctgttaaagtatgacacccactataccttaaacaaccgctggagcaacatagcgcctggacctccaatggcaacagctggaccttcagatggggacttcagcaacgcccagctcatcttccctggaccatcagtcaccggaaacacaacaacctcagcaaacaatctgttgtttacatcagaaggagaaattgctgccaccaacccaagagacacggacatgtttggtcagattgctgacaataatcagaatgctacaactgctcccataaccggcaacgtgactgctatgggagtgcttcctggcatggtgtggcaaaacagagacatttactaccaagggccaatttgggccaagatcccacacgcggacggacattttcatccttcaccgctaattggcggttttggactgaaacatccgcctccccagatatttatcaaaaacacccccgtacctgccaatcctgcgacaaccttcactgcagccagagtggactctttcatcacacaatacagcaccggccaggtcgctgttcagattgaatgggaaatcgaaaaggaacgctccaaacgccggaatcctgaagtgcagtttacttcaaactatgggaaccagtcttctatgttgtgggctcccgatacaactgggaagtatacagagccgcgggttattggctctcgttatttgactaatcatttgtaactgcctagttaatcaataaaccgtgtgattcgtttcagttgaactttggtctctgcgaagggcgaattc

SEQ ID NO: 5014 - DNA, 3105 bp, Adeno-associated virus
gaattcgcccttcgcagagaccaaagttcaactgaaacgaatcacacggtttattgattaactaggcagttacaaatgattagtcaaataacgagagccaataacccgcggctctgtatacttcccagttgtatcgggagcccacaacatagaagactggttcccacagtttgaagtaaactgcacttcaggattccagcgtttggagcgttccttttcgatttcccattcaatctgaacagcgacctggccggtgctgtattgtgtgatgaaagagtccactctggctgcagtgaaggttgtcgcaggataggcaggtacgggggtgtttttgataaatatctggggaggcggatgtttcagtccaaaaccgccaattagcggtgaaggatgaaaatgtccgtccgcgtgtgggatcttggcccaaattggcccttggtagtaaatgtctctgttttgccacaccatgccaggaagcactcccatagcagtcacgttgccggttatgggagcagttgtagcattctgattattgtcagcaatctgaccaaacatgtccgtgtctcttgggttggtggcagcaatttcttcttctgatgtaaacaacagattgtttgctgaggttgttgtgtttccggtgactgatggtccagggaagatgagctgggcgttgctgaagtccccatctgaaggtccagctgttgccattggaggtccaggcgctatgttgctccagcggttgtttaaggtatagtgggtgtcatactttaacagagcgttgcccccgctggcaggaatcttgtaattttgactggcagtttttgagaatctctgctgtttaacacaaggcccaggcagccagttctttctgtaaaaggcaaagtctccactcctgatttttccaaatgtggttgctgcattgccttgattcagagtctctccagaggtggtcgactgtaagtgccacaggtactggtccaggaggggattcatcagtccgtccaggctctggctgtgagcatacattgagtggaacggcaccttctcaaagttgtaagccgtttcaaagttattgccagttctcagcatttgtgaaggaaaatactccaggcagtagaaagcatttctgtccgtctggttctgattttcgccagtcacaatgccacagtagccatattgaggcaccatgaagacgtcattggggaaaggaggcagacttccctcttgtccagcgtccatcacgtacgggagctcatacgacgagtccgcaaatatctgaaccgtgctggtaaggttattagcgaccgtagtctcgccgttcgacgttgtgacctccttaacttggatattgaagattttaacgcgcatggcttttggtcgtagtccccagttgttgttgatgagtctttgccagtcacgtggtgagaagtgacagtggaatctgttaaagtcaaagtatccccagggggtggagaatccgttgtaggtgttgctgtttgatgttgttccgagccgcaggtacaagtggttgttgtaggtgggcaagacccaggttctggtcgaggttgttgtgaccttgccctcagaccaggtggaatcgcaatgccaatcacccgaggcattacccactccatcggaaccttgtcccgcatcgacagcatttccgcccggtgctgcacgcatttcaatgtctgaagacatggcgctggtatctgatccttcagggggtccgtctccggctccagtgtcctcttcaaagttgagtctctttttggctggttgtttgccttttttgccgattcctgaggaggagtcgggctcttgtggtgactctaacggtctcttctttccaggagccgtcttagcaccttcttcaaccaggcccagaggttcgagtaccctcttcttggcctggaagactgctcgcccgaggttgcccccaaaagacgtatcttcttgcagacgctcctgaaactcggcgtcggcgtggttataccgcaggtacggattgtcacccgctttgagctgctggtcgtaggccttgtcgtgctcgagggccgctgcgtccgccgcgttgacgggctcccccttgtcgagtccgttgaagggtccgaggtactcgtagccaggaagcaccagaccccggccgtcgtcctgcttctgctggttggccttgggcttgggggctccaggtttcaggtcccaccactcgcgaatgccctcagagaggttgtcctcgagccaatctggaagataaccgtcagcagccatacctggtttaagtcatttattgctcagaaacacagtcatccaagtccacgttgacgagatcgcaggccgaacacgcaatctcgggtgcccgccccagcagatgatgaatcgcgcacagtttctgatacgtcttttttctgacgacgggttgagattctgacgcgccggggaagcactctgagcagtctctgaccccgtgcgtgaagcagacgttgaaattctgattcattctctcgcatgtcttgcagggaaacagcatctgaagcatgcccgcgtgacgagaacatttgttttggtacctgtccgcaaggtccaccggtgcttccgcgtctgacgtcgatggctccgcaactgaggggcaggcccgcttgggctcgcttatatccgcgtcactgggggcgggtcttttggtggctccgccctttctgacgtagaactcatgcgccacctcagtcacgtgatcctgagcccagcggaagaactctttgacttcctgcttggtcaccttgccaaagtcgtgctccagacggcgggtgagctcgaacttgaacatgcggtcctgcagcggctgctggtgctcgaaggtggtgctgttcccgtcgatcacggcgcacatgttggtgttggaggtgacgatcacgggcgtggggtcgatctgggccgatgacttgcacttttggtccacgcgcaccttgcttccgcccagaatggccttggcggactccacgaccttggcggtcatcttgccctcctcccaccagatcaccatcttgtcgacgcaatcgttgaagggaaagttctcattggtccagttgacgcagcaagggcgaattc

SEQ ID NO: 5015 - DNA, 3094 bp, Adeno-associated virus
gaattcgcccttgctgcgtcaactggaccaagagaactttcccttcaacgattgcgtcgacaagatggtgatctggtgggaggagggcaagatgacggccaaggtcgtggagtccgccaaagccattctgggcggaagcaaggtgcgcgtcgaccaaaagtgcaagtcctcggcccagatcgatcccacccccgtgatcgtcacctccaacaccaacatgtgcgccgtgatcgacgggaacagcaccaccttcgagcaccagcagccgttgcaggaccggatgttcaaatttgaactcacccgccgtctggaacacgactttggcaaggtgaccaagcaggaagtcaaagagttcttccgctgggctagtgatcacgtgactgaggtgacgcatgagttctacgtcagaaagggcggagccagcaaaagacccgcccccgatgacgcggatataagcgagcccaagcgggcctgtccctcagtcacggacccatcgacgtcagacgcggaaggagctccggtggactttgccgacaggtaccaaaacaaatgttctcgtcacgcgggcatgcttcagatgctgtttccctgcaaaacgtgcgagagaatgaatcagaatttcaacatttgcttcacgcacggggtcagagactgtttagaatgtttccccggcgtgtcagaatctcaaccggtcgtcagaaaaaagacgtatcggaagctgtgtgcgattcatcatctgctggggcgggcacccgagattgcttgctcggcctgcgacctggtcaacgtggacctggacgactgtgtttctgagcaataaatgacttaaaccgggtatggctgccgatggttatcttccagattggctcgaggacaacctctctgagggcattcgcgagtggtgggacctgaaacctggagccccgaaacccaaagccaaccagcaaaagcaggacgacggccggggtctggtgcttcctggctacaagtacctcggacccttcaacggactcgacaagggggagcccgtcaacgcggcggacgcagcggccctcgagcacgacaaggcctacgaccagcagctcaaagcgggtgacaatccgtacctgcggtataaccacgccgacgccgagtttcaggagcgtctgcaagaagatacgtcatttgggggcaacctcgggcgagcagtcttccaggccaagaagcgggttctcgaacctctcggtctggttgaggaaggcgctaagacggctcctggaaagaagagacccatagactctccagactcctccacgggcatcggcaaaaaaggccagcagcccgctaaaaagaagctcaattttggtcagactggcgactcagagtcagtccccgaccctcaacctcttggagaacctccagcagcgccctctagtgtgggatctggtacaatggctgcaggcggtggcgcaccaatggcagacaataacgaaggtgccgacggagtgggtaatgcctcaggaaattggcattgcgattccacatggctgggcgacagagtcatcaccaccagcaccagaacctgggccctccccacctacaacaaccacctctacaagcaaatctccagcagcagctcaggagccaccaatgacaaccactacttcggctacagcaccccctgggggtattttgactttaacagattccactgccacttctcaccacgtgactggcagcgactcatcaacaacaactggggattccggcccaagaagctgcggttcaagctcttcaacatccaggtcaaggaggtcacaacgaatgacggcgtcacgaccatcgctaataaccttaccagcacggttcaggtcttctcggactcggaataccagctgccgtacgtcctcggctctgcgcaccagggctgcctgcctccgttcccggcggacgtcttcatgattcctcagtacggctacctgactctgaacaacggcagccaatcggtgggccgttcctccttctactgcctggaatatttcccctctcaaatgctgagaacgggcaacaactttgagttcagttacagcttcgaggacgtgcctttccacagcagctacgcgcacagccagagcctagaccggctgatgaaccctctcatcgaccagtacctgtactacctggcccggacccagagcaccacgggttccaccagggaactgcaatttcatcaagctgggcccaatactatggccgagcagtcaaagaactggctgcctggaccctgctataggcaacagggactgtcaaagaacttggactttaacaacaacagcaattttgcctggactgctgccactaaatatcatctgaatggcagaaactctttgaccaatcctggcattcccatggcaaccaacaaggatgatgaggaccagttctttcccatcaacggggtactggtttttggcaagacgggagctgccaacaaaactacgctggaaaacgttctgatgaccagcgaggaggagatcaagaccactaaccctgtggctacagaagaatacggtgtggtctccagcaacctgcagccgtctacagccgggcctcaatcacagactatcaacagccagggagcactgcctggcatggtctggcagaaccgggacgtgtatctgcagggtcccatctgggccaaaattcctcacacggatggcaactttcacccgtctcctctgatgggcggttttggactcaaacacccgcctccacagatcctgatcaaaaacacacctgtacctgctaatcctccggaggtgtttactcctgccaagtttgcctccttcatcacgcagtacagcaccggacaagtcagcgtggaaatcgagtgggagctgcagaaagaaaacagcaagcgctggaacccagaaattcagtatacttccaattatgccaagtctaataatgttgaatttgctgtgaaccctgatggtgtttatactgagcctcgccccattggcactcgttacctcccccgtaatctgtaattgcttgttaatcaataaaccggttgattcgtttcagttgaactttggtctctgcgaagggcgaattc

SEQ ID NO: 5016 - DNA, 3095 bp, Adeno-associated virus
gaattcgcccttcgcagagaccaaagttcaactgaaacgaatcaaccggtttattgattaacaagcaattacagattacgggtgaggtaacgagtgccaatggggcgaggctcagtataaacaccatcagggttcacagcaaattcaacattattagacttggcataattggaagtatactgaatttctgggttccagcgcttgctgttttctttctgcagctcccactcgatttccacgctgacttgtccggtgctgtactgcgtgatgaaggaggcaaacttggcaggagtaaacacctccggaggattagcaggtacaggtgtgtttttgatcaggatctgtggaggcgggtgtttgagtccaaaaccgcccatcagaggagacgggtgaaagttgccatccgtgtgaggaattttggcccagatgggaccctgcagatacacgtcccggttctgccagaccatgccaggcagtgctccctggctgttgatagtctgtgattgaggcccggctgtagacgactgcaggttgctggagaccacaccgtattcttctgtagccacagggttagtggtcttgatctcctcctcgctggtcatcagaacgttttccagcgtagttttgttggcagctcccgtcttgccaaaaaccagtaccccgttgatgggaaagaactggtcctcatcatccttgttggttgccatgggaatgccaggattggtcaaagagtttctgccattcagatgatatttagtggcagcagtccaggcaaaattgctgttgttgttaaagtccaagttctttgacagtctctgttgcctatagcagggtccaggcagccagttctttgactgctcggccatagtattgggcccagcttgatgaaattgcagttccctggtggaacccgtggtgctctgggtccgggccaggtagtacaggtactggtcgatgagagggttcatcagccggtctaggctctggctgtgcgcgtagctgctgtggaaaggcacgtcctcgaagctgtaactgaactcaaagttgttgcccgttctcagcatttgagaggggaaatattccaggcagtagaaggaggaacggcccaccgattggctgccgttgtccagagtcaggtagccgtactgaggaatcatgaagacgtccgccgggaacggaggcaggcagccctggtgcgcagagccgaggacgtacggcagctggtattccgagtccgagaagacctgaaccgtgctggtaaggttattagcgatggtcgtgacgccgtcattcgttgtgacctccttgacctggatgttgaggagcttgaaccgcagcttcttgggccggaatccccagttgttgttgatgagtcgctgccagtcacgtggtgagaagtggcagtggaatctgttaaagtcaaaatacccccagggggtgctgtagccgaagtagtggttgtcattggtggctcctgagctgctgctggagatttgcttgtagaggtggttgttgtaggtggggagggcccaggttctggtgctggtggtgatgactctgtcgcccagccatgtggaatcgcaatgccaatttcctgaggcattacccactccgtcggcaccttcgttattgtctgccattggtgcgccaccgcctgcagccattgtaccagatcccacactagagggcgctgctggaggttctccaagaggttgagggtcggggactgactctgagtcgccagtctgaccaaaattgagcttctttttagcgggctgctggccttttttgccgatgcccgtggaggagtctggagagcctatgggtctcttctttccaggagccgtcttagcgccttcctcaaccagaccgagaggttcgagaacccgcttcttggcctggaagactgctcgcccgaggttgcccccaaatgacgtatcttcttgcagacgctcctgaaactcggcgtcggcgtggttataccgcaggtacggattgtcacccgctttgagctgctggtcgtaggccttgtcgtgctcgagggccgctgcgtccgccgcgttgacgggctcccccttgtcgagtccgttgaagggtccgaggtacttgtagccaggaagcaccagaccccggccgtcgtcctgcttttgctggttggctttgggtttcggggctccaggtttcaggtcccaccactcgcgaatgccctcagagaggttgtcctcgagccaatctggaagataaccatcggcagccatacctggtttaagtcatttattgctcagaaacacagtcgtccaggtccacgttgaccaggtcgcaggccgagcaagcaatctcgggtgcccgccccagcagatgatgaatcgcacacagcttccgatacgtcttttttctgacgaccggttgagattctgacacgccggggaaacattctaaacagtctctgaccccgtgcgtgaagcaaatgttgaaattctgattcattctctcgcacgttttgcagggaaacagcacctgaagcatgcccgcgtgacgagaacatttgttttggtacctgtcggcaaagtccaccggagctccttccgcgtctgacgtcgatgggtccgtgactgagggacgggcccgcttgggctcgcttatatccgcgtcatcgggggcgggtcttttgctggctccgccctttctgacgtagaactcatgcgtcacctcagtcacgtgatcactagcccagcggaagaactctttgacttcctgctttgtcaccttgccaaagtcgtgttccagacggcgggtgagttcaaatttgaacatccggtcctgcaacggttgctggtgctcgaaggtggtgctgttcccgtcgatcacggcgcacatgttggtgttggaggtgacgatcacgggggtgggatcgatctgggcggacgacttgcacttttggtccacgcgcaccttgctgccgccgagaatggccttggcggactccacgaccttggccgtcatcttgccctcctcccaccagatcaccatcttgtcgacgcaatcgttgaagggaaagttctcattggtccagttgacgcagcaagggcgaattc

SEQ ID NO: 5017 - DNA, 3095 bp, Adeno-associated virus
gaattcgcccttcgcagagaccaaagttcaactgaaacgaatcaaccggtttattgattaacaagcaattacagattacgggtgaggtaacgagtgccaatggggcgaggctcagtataaacaccatcagggttcacagcaaattcaacattattagacttggcataattggaagtatactgaatttctgggttccagcgcttgctgttttctttctgcagctcccactcgatttccacgctgacttgtccggtgctgtactgcgtgatgaaggaggcaaacttggcaggagtaaacacctccggaggattagcaggtacaggtgtgtttttgatcaggatctgtggaggcgggtgttcgagtccaaaaccgcccatcagaggagacgggtgaaagttgccatccgtgtgaggaattttggcccagatgggaccctgcagatacacgtcccggttctgccagaccatgccaggcagtgctccctggctgttgatagtctgtgattgaggcccggctgtagacgactgcaggttgctggagaccacaccgtattcttctgtagccacagggttagtggtcttgatctcctcctcgctggtcatcagaacgttttccagcgtagttttgttggcagctcccgtcttgccaaaaaccagtaccccgttgatgggaaagaactggtcctcatcatccttgttggttgccatgggaatgccaggattggtcaaagagtttctgccattcagatgatatttagtggcagcagtccaggcaaaattgctgttgttgttaaagtccaagttctttgacagtctctgttgcctatagcagggtccaggcagccagttctttgactgctcggccatagtattgggcccagcttgatgaaattgcagttccctggtggaacccgtggtgctctgggtccgggccaggtagtacaggtactggtcgatgagagggttcatcagccggtctaggctctggctgtgcgcgtagctgctgtggaaaggcacgtcctcgaagctgtaactgaactcaaagttgttgcccgttctcagcatttgagaggggaaatattccaggcagtagaaggaggaacggcccaccgattggctgccgttgttcagagtcaggtagccgtactgaggaatcatgaagacgtccgccgggaacggaggcaggcagccctggtgcgcagagccgaggacgtacggcagctggtattccgagtccgagaagacctgaaccgtgctggtaaggttattagcgatggtcgtgacgccgtcattcgttgtgacctccttgacctggatgttgaagagcttgaaccgcagcttcttgggccggaatccccagttgttgttgatgagtcgctgccagtcacgtggtgagaagtggcagtggaatctgttaaagtcaaaatacccccagggggtgctgtagccgaagtagtggttgtcattggtggctcctgagctgctgctggagatttgcttgtagaggtggttgttgtaggtggggagggcccaggttctggtgctggtggtgatgactctgtcgcccagccatgtggaatcgcaatgccaatttcctgaggcattacccactccgtcggcaccttcgttattgtctgccgttggtgcgccaccgcctgcagccattgtaccagatcccacactagagggcgctgctggaggttctccaagaggttgagggtcggggactgactctgagtcgccagtctgaccaaaattgagcttctttttagcgggctgctggccttttttgccgatgcccgtggaggagtctggagagtctatgggtctcttctttccaggagccgtcttagcgccttcctcaaccagaccgagaggttcgagaacccgcttcttggcctggaagactgctcgcccgaggttgcccccaaatgacgtatcttcttgcaggcgctcctgaaactcggcgtcggcgtggttataccgcaggtacggattgtcacccgctttgagctgctggtcgtaggccttgtcgtgctcgagggccgctgcgtccgccgcgttgacgggctcccccttgtcgagtccgttgaagggtccgaggtacttgtagccaggaagcaccagaccccggccgtcgtcctgcttttgctggttggctttgggtttcggggctccaggtttcaggtcccaccactcgcgaatgccctcagagaggttgtcctcgagccaatctggaagataaccatcggcagccatacctggtttaagccatttattgctcagaaacacagtcgtccaggtccacgttgaccaggtcgcaggccgagcaggcaatctcgggtgcccgccccagcagatgatgaatcgcacacagcttccgatacgtcttttttctgacgaccggttgagattctgacacgccggggaaacattctaaacagtctctgaccccgtgcgtgaagcaaatgttgaaattctgattcattctctcgcacgttttgcagggaaacagcatctgaagcatgcccgcgtggcgagaacatttgttttggtacctgtcggcaaagtccaccggagctccttccgcgtctgacgtcgatgggtccgtgactgagggacaggcccgcttgggctcgcttatatccgcgtcatcgggggcgggtcttttgctggctccgccctttctgacgtagaactcatgcgtcacctcagtcacgtgatcactagcccagcggaagaactctttgacttcctgctttgtcaccttgccaaagtcgtgttccagacggcgggtgagttcaaatttgaacatccggtcctgcaacggctgctggtgctcgaaggtggtgctgttcccgtcgatcacggcgcgcatgttggtgttggaggtgacgatcacgggggtgggatcgatctgggcggacgacttgcacttttggtccacgcgcaccttgctgccgccgagaatggccttggcggactccacgaccttggccgtcatcttgccctcctcccaccagatcaccatcttgtcgacgcaatcgttgaagggaaagttctcattggtccagttgacgcagcaagggcgaattc

SEQ ID NO: 5018 - protein, 729 aa, Adeno-associated virus; identical to SEQ ID NO: 4833

SEQ ID NO: 5019 - protein, 729 aa, Adeno-associated virus
MAADGYLPDWLEDNLSEGIREWWDLKPGAPKPKANQQKQDDGRGLVLPGYKYLGPFNGLDKGEPVNAADAAALEHDKAYDQQLKAGDNPYLRYNHADAEFQERLQEDTSFGGNLGRAVFQAKKRVLEPLGLVEEGAKTAPGKKRPIDSPDSSTGIGKKGQQPAKKKLNFGQTGDSESVPDPQPLGEPPAAPSSVGSGTMAAGGGAPTADNNEGADGVGNASGNWHCDSTWLGDRVITTSTRTWALPTYNNHLYKQISSSSSGATNDNHYFGYSTPWGYFDFNRFHCHFSPRDWQRLINNNWGFRPKKLRFKLFNIQVKEVTTNDGVTTIANNLTSTVQVFSDSEYQLPYVLGSAHQGCLPPFPADVFMIPQYGYLTLNNGSQSVGRSSFYCLEYFPSQMLRTGNNFEFSYSFEDVPFHSSYAHSQSLDRLMNPLIDQYLYYLARTQSTTGSTRELQFHQAGPNTMAEQSKNWLPGPCYRQQRLSKNLDFNNNSNFAWTAATKYHLNGRNSLTNPGIPMATNKDDEDQFFPINGVLVFGKTGAANKTTLENVLMTSEEEIKTTNPVATEEYGVVSSNLQSSTAGPQSQTINSQGALPGMVWQNRDVYLQGPIWAKIPHTDGNFHPSPLMGGFGLKHPPPQILIKNTPVPANPPEVFTPAKFASFITQYSTGQVSVEIEWELQKENSKRWNPEIQYTSNYAKSNNVEFAVNPDGVYTEPRPIGTRYLTRNL

SEQ ID NO: 5020 - protein, 729 aa, Adeno-associated virus
MAADGYLPDWLEDNLSEGIREWWDLKPGAPKPKANQQKQDDGRGLVLPGYKYLGPFNGLDKGEPVNAADAAALEHDKAYDQQLKAGDNPYLRYNHADAEFQERLQEDTSFGGNLGRAVFQAKKRVLEPLGLVEEGAKTAPGKKRPIDSPDSSTGIGKKGQQPAKKKLNFGQTGDSESVPDPQPLGEPPAAPSSVGSGTMAAGGGAPMADNNEGADGVGNASGNWHCDSTWLGDRVITTSTRTWALPTYNNHLYKQISSSSSGATNDNHYFGYSTPWGYFDFNRFHCHFSPRDWQRLINNNWGFRPKKLRFKLFNIQVKEVTTNDGVTTIANNLTSTVQVFSDSEYQLPYVLGSAHQGCLPPFPADVFMIPQYGYLTLNNGSQSVGRSSFYCLEYFPSQMLRTGNNFEFSYSFEDVPFHSSYAHSQSLDRLMNPLIDQYLYYLARTQSTTGSTRELQFHQAGPNTMAEQSKNWLPGPCYRQQRLSKNLDFNNNSNFAWTAATKYHLNGRNSLTNPGIPMATNKDDEDQFFPINGVLVFGKTGAANKTTLENVLMTSEEEIKTTNPVATEEYGVVSSNLQSSTAGPQSQTINSQGALPGMVWQNRDVYLQGPIWAKIPHTDGNFHPSPLMGGFGLKHPPPQILIKNTPVPANPPEVFTPAKFASFITQYSTGQVSVEIEWELQKENSKRWNPEIQYTSNYAKSNNVEFAVNPDGVYTEPRPIGTRYLTRNL

SEQ ID NO: 5021 - DNA, 2217 bp, Adeno-associated virus
atggctgctgacggttatcttccagattggctcgaggacaacctctctgagggcattcgcgagtggtgggacctgaaacctggagcccccaagcccaaggccaaccagcagaagcaggacgacggccggggtctggtgcttcctggctacaagtacctcggacccttcaacggactcgacaagggggagcccgtcaacgcggcggacgcagcggccctcgagcacgacaaggcctacgaccagcagctcaaagcgggtgacaatccgtacctgcggtataaccacgccgacgccgagtttcaggagcgtctacaagaagatacgtcttttgggggcaacctcgggcgagcagtcttccaggccaagaagcgggttctcgaacctctcggtctggttgaggaagctgctaagacggctcctggaaagaagagaccggtagaaccgtcacctcagcgttcccccgactcctccacgggcatcggcaagaaaggccagcggcccgctaaaaagagactgaactttggtcagactggcgactcagagtcagtccccgaccctcaaccaatcggagaaccaccagcaggcccctctggtctgggatctggtacaatggctgcaggcggtggcgctccaatggcagacaataacgaaggcgccgacggagtgggtagttcctcaggaaattggcattgcgattccacatggctgggcgacagagtcatcaccaccagcacccgaacctgggccctgcccacctacaacaaccacctctacaagcaaatatccaatgggacatcgggaggaagcaccaacgacaacacctacttcggctacagcaccccctgggggtattttgacttcaacagattccactgccacttctcaccacgtgactggcagcgactcatcaacaacaactggggattccggccaaaaagactcagcttcaagcccttcaacatccaggtcaaggaggtcacgcagaatgaaggcaccaagaccatcgccaataaccttaccagcacgattcaggtatttacggactcggaataccagctgccgtacgtcctcggctccgcgcaccagggctgcctgcctccgttcccggcggacgtcttcatgattccccagtacggctaccttacactgaacaatggaagtcaagccgtaggccgttcctccttctactgcctggaatattttccatctcaaatgctgcgaactggaaacaattttgaattcagctacaccttcgaggacgtgcctttccacagcagctacgcacacagccagagcttggaccgactgatgaatcctctcatcgaccagtacctgcactacttatccagaactcagtccacaggaggaactcaaggtacccagcaattgttattttctcaagctgggcctgcaaacatgtcggctcaggctaagaactggctacctggaccttgctaccggcagcagcgagtctctacgacactgtcgcaaaacaacaacagcaactttgcttggactggtgccaccaaatatcacctgaacggaagagactctttggtaaatcccggtgtcgccatggcaacccacaaggacgacgaggaacgcttcttcccgtcgagtggagtcctgatgtttggaaaacagggtgctggaagagacaatgtggactacagcagcgttatgctaaccagcgaagaagaaattaaaaccactaaccctgtagccacagaacaatacggtgtggtggctgacaacttgcagcaaaccaatacagggcctattgtgggaaatgtcaacagccaaggagccttacctggcatggtctggcagaaccgagacgtgtacctgcagggtcccatctgggccaagattcctcacacggacggcaacttccacccttcaccgctaatgggaggatttggactgaagcacccacctcctcagatcctgatcaagaacacgccggtacctgcggatcctccaacaacgttcagccaggcgaaattggcttccttcattacgcagtacagcaccggacaggtcagcgtggaaatcgagtgggagctgcagaaggagaacagcaaacgctggaacccagagattcagtacacttcaaactactacaaatctacaaatgtggactttgctgtcaatacagagggaacttattctgagcctcgccccattggtactcgctacctcacccgtaatctgtaa

SEQ ID NO: 5022 - protein, 738 aa, Adeno-associated virus
MAADGYLPDWLEDNLSEGIREWWDLKPGAPKPKANQQKQDDGRGLVLPGYKYLGPFNGLDKGEPVNAADAAALEHDKAYDQQLKAGDNPYLRYNHADAEFQERLQEDTSFGGNLGRAVFQAKKRVLEPLGLVEEAAKTAPGKKRPVEPSPQRSPDSSTGIGKKGQRPAKKRLNFGQTGDSESVPDPQPIGEPPAGPSGLGSGTMAAGGGAPMADNNEGADGVGSSSGNWHCDSTWLGDRVITTSTRTWALPTYNNHLYKQISNGTSGGSTNDNTYFGYSTPWGYFDFNRFHCHFSPRDWQRLINNNWGFRPKRLSFKPFNIQVKEVTQNEGTKTIANNLTSTIQVFTDSEYQLPYVLGSAHQGCLPPFPADVFMIPQYGYLTLNNGSQAVGRSSFYCLEYFPSQMLRTGNNFEFSYTFEDVPFHSSYAHSQSLDRLMNPLIDQYLHYLSRTQSTGGTQGTQQLLFSQAGPANMSAQAKNWLPGPCYRQQRVSTTLSQNNNSNFAWTGATKYHLNGRDSLVNPGVAMATHKDDEERFFPSSGVLMFGKQGAGRDNVDYSSVMLTSEEEIKTTNPVATEQYGVVADNLQQTNTGPIVGNVNSQGALPGMVWQNRDVYLQGPIWAKIPHTDGNFHPSPLMGGFGLKHPPPQILIKNTPVPADPPTTFSQAKLASFITQYSTGQVSVEIEWELQKENSKRWNPEIQYTSNYYKSTNVDFAVNTEGTYSEPRPIGTRYLTRNL

SEQ ID NO: 5023 - DNA, 2217 bp, Adeno-associated virus
atggctgctgacggttatcttccagattggctcgaggacaacctctctgagggcattcgcgagtggtgggacctgaaacctggagcccccaagcccaaggccaaccagcagaagcaggacgacggccggggtctggtgcttcctggctacaagtacctcggacccttcaacggactcgacaagggggagcccgtcaacgcggcggacgcagcggccctcgagcacgacaaggcctacgaccagcagctcaaagcgggtgacaatccgtacctgcggtataaccacgccgacgccgagtttcaggagcgtctgcaagaagatacgtcttttgggggcaacctcgggcgagcagtcttccaggccaagaagcgggttctcgaacctctcggtctggttgaggaagctgctaagacggctcctggaaagaagagaccggtagaaccgtcacctcagcgttcccccgactcctccacgggcatcggcaagaaaggccagcagcccgctaaaaagagactgaactttggtcagactggcgactcagagtcagtccccgaccctcaaccaatcggagaaccaccagcaggcccctctggtctgggatctggtacaatggctgcaggcggtggcgctccaatggcagacaataacgaaggcgccgacggagtgggtagttcctcaggaaattggcattgcgattccacatggctgggcgacagagtcatcaccaccagcacccgaacctgggccctgcccacctacaacaaccacctctacaagcaaatatccaatgggacatcgggaggaagcaccaacgacaacacctacttcggctacagcaccccctgggggtattttgacttcaacagattccactgccacttctcaccacgtgactggcagcgactcatcaacaacaactggggattccggccaaaaagactcagcttcaagctcttcaacatccaggtcaaggaggtcacgcagaatgaaggcaccaagaccatcgccaataaccttaccagcacgattcaggtatttacggactcggaataccagctgccgtacgtcctcggctccgcgcaccagggctgcctgcctccgttcccggcggacgtcttcatgattccccagtacggctaccttacactgaacaatggaagtcaagccgtaggccgttcctccttctactgcctggaatattttccatctcaaatgctgcgaactggaaacaattttgaattcagctacaccttcgaggacgtgcctttccacagcagctacgcacacagccagagcttggaccgactgatgaatcctctcatcgaccagtacctgtactacttatccagaactcagtccacaggaggaactcaaggtacccagcaattgttattttctcaagctgggcctgcaaacatgtcggctcaggctaagaactggctacctggaccttgctaccggcagcagcgagtctctacgacactgtcgcaaaacaacaacagcaactttgcttggactggtgccaccaaatatcacctgaacggaagagactctttggtaaatcccggtgtcgccatggcaacccacaaggacgacgaggaacgcttcttcccgtcgagtggagtcctgatgtttggaaaacagggtgctggaagagacaatgtggactacagcagcgttatgctaaccagcgaagaagaaattaaaaccactaaccctgtagccacagaacaatacggtgtggtggctgataacttgcagcaaaccaatacggggcctattgtgggaaatgtcaacagccaaggagccttacctggcatggtctggcagaaccgagacgtgtacctgcagggtcccatctgggccaagattcctcacacggacggcaacttccacccttcaccgctaatgggaggatttggactgaagcacccacctcctcagatcctgatcaagaacacgccggtacctgcggatcctccaacaacgttcagccaggcgaaattggcttccttcattacgcagtacagcaccggacaggtcagcgtggaaatcgagtgggagctgcagaaggagaacagcaaacgctggaacccagagattcagtacacttcaaactactacaaatctacaaatgtggactttgctgtcaatacagagggaacttattctgagcctcgccccattggtactcgttacctcacccgtaatctgtaa

SEQ ID NO: 5024 - protein, 738 aa, Adeno-associated virus; identical to SEQ ID NO: 4797

SEQ ID NO: 5025 - protein, 738 aa, Adeno-associated virus
MAADGYLPDWLEDNLSEGIREWWDLKPGAPKPKANQQKQDDGRGLVLPGYKYLGPFNGLDKGEPVNAADAAALEHDKAYDQQLKAGDNPYLRYNHADAEFQERLQEDTSFGGNLGRAVFQAKKRVLEPLGLVEEAAKTAPGKKRPVEPSPQRSPDSSTGIGKKGQQPAKKRLNFGQTGDSESVPDPQPIGEPPAGPSGLGSGTMAAGGGAPMADNNEGADGVGSSSGNWHCDSTWLGDRVITTSTRTWALPTYNNHLYKQISNGTSGGSTNDNTYFGYSTPWGYFDFNRFHCHFSPRDWQRLINNNWGFRPKRLSFKLFNIQVKEVTQDEGTKTIANNLTSTIQVFTDSEYQLPYVLGSAHQGCLPPFPADVFMIPQYGYLTLNNGSQAVGRSSFYCLEYFPSQMLRTGNNFEFSYTFEDVPFHSSYAHSQSLDRLMNPLIDQYLYYLSRTQSTGGTQGTQQLLFSQAGPANMSARAKNWLPGPCYRQQRVSTTLSQNNNSNFAWTGATKYHLNGRDSLVNPGVAMATHKDDEERFFPSSGVLMFGKQGAGRDNVDYSSVMLTSEEEIKTTNPVATEQYGVVADNLQQANTGPIVGNVNSQGALPGMVWQNRDVYLQGPIWAKIPHTDGNFHPSPLMGGFGLKHPPPQILIKNTPVPADPPTTFSQAKLASFITQYSTGQVSVEIEWELQKENSKRWNPEIQYTSNYYKSTNVDFAVNSEGTYSEPRPIGTRYLTRNL

SEQ ID NO: 5026 - DNA, 2217 bp, Adeno-associated virus
atggctgctgacggttatcttccagattggctcgaggacaacctctctgagggcattcgcgagtggtgggacctgaaacctggagcccccaagcccaaggccaaccagcagaagcaggacgacggccggggtctggtgcttcctggctacaagtacctcggacccttcaacggactcgacaagggggagcccgtcaacgcggcggacgcagcggccctcgagcacgacaaggcctacgaccagcagctcaaagcgggtgacaatccgtacctgcggtataaccacgccgacgccgagtttcaggagcgtctgcaagaagatacgtcttttgggggcaacctcgggcgagcagtcttccaggccaagaagcgggttctcgaacctctcggtctggttgaggaagctgctaagacggctcctggaaagaagagaccggtagaaccgtcacctcagcgttcccccgactcctccacgggcatcggcaagaaaggccagcagcccgctaaaaagagactgaactttggtcagactggcgactcagagtcagtccccgaccctcaaccaatcggagaaccaccagcaggcccctctggtctgggatctggtacaatggctgcaggcggtggcgctccaatggcagacaataacgaaggcgccgacggagtgggtagttcctcaggaaattggcattgcgattccacatggctgggcgacagagtcatcaccaccagcacccgaacctgggccctgcccacctacaacaaccacctctacaagcaaatatccaatgggacatcgggaggaagcaccaacgacaacacctacttcggctacagcaccccctgggggtattttgacttcaacagattccactgccacttctcaccacgtgactggcagcgactcatcaacaacaactggggattccggccaaaaagactcagcttcaagctcttcaacatccaggtcaaggaggtcacgcaggatgaaggcaccaagaccatcgccaataaccttaccagcacgattcaggtatttacggactcggaataccagctgccgtacgtcctcggctccgcgcaccagggctgcctgcctccgttcccggcggacgtcttcatgattccccagtacggctaccttacactgaacaatggaagtcaagccgtaggccgttcctccttctactgcctggaatattttccatctcaaatgctgcgaactggaaacaattttgaattcagctacaccttcgaggacgtgcctttccacagcagctacgcacacagccagagcttggaccgactgatgaatcctctcatcgaccagtacctgtactacttatccagaactcagtccacaggaggaactcaaggtacccagcaattgttattttctcaagctgggcctgcaaacatgtcggctcgggctaagaactggctacctggaccttgctaccggcagcagcgagtctctacgacactgtcgcaaaacaacaacagcaactttgcttggactggtgccaccaaatatcacctgaacggaagagactctttggtaaatcccggtgttgctatggcaacgcataaggacgacgaggaacgtttctttccatcgagcggagtcctgatgtttggaaaacagggtgctggaagagacaatgtggactatagcagcgttatgctaaccagcgaggaagaaattaaaaccactaaccctgtagccacagaacaatacggtgtggtggctgacaacttgcagcaagccaatacagggcctattgtgggaaatgtcaacagccaaggagccttacctggcatggtctggcagaaccgagacgtgtacctgcagggtcccatctgggccaaaattcctcacacggacggcaattttcacccgtctcctctgatgggcggctttggactgaagcacccacctccccagatcctgatcaagaatacgccggtacctgcggatcctccaacgacgttcagccaggcaaaattggcttccttcatcacgcagtacagcaccggccaggtcagcgtggagatcgagtgggagctgcagaaggagaacagcaagcgatggaacccagaaattcagtacacttccaactactacaaatctacaaatgtggactttgctgtcaattctgagggtacatattcagagcctcgccccattggtactcgttatctgacacgtaatctgtaa

SEQ ID NO: 5027 - DNA, 2211 bp, Adeno-associated virus
atggctgccgatggttatcttccagattggctcgaggacaacctctctgagggcattcgcgagtggtgggacttgaaacctggagccccgaaacccaaagccaaccagcaaaagcaggacgacggccggggcctggtgcttcctggctacaagtacctcggacccttcaacggactcgacaagggggagcccgtcaacgcggcggacgcagcggccctcgagcacgacaaggcctacgaccagcagctcgaagcgggtgacaatccgtacctgcggtataaccacgccgacgccgagtttcaggagcgtctgcaagaagatacgtcttttgggggcaacctcgggcgagcagtcttccaggccaagaagcgggttctcgaacctctcggtctggttgaggaaggcgctaagacggctcctggaaagaagagaccagtagagcagtcaccccaagaaccagactcctcctcgggcatcggcaagaaaggccaacagcccgccagaaaaagactcaattttggccagactggcgactcagagtcagttccagaccctcaacctctcggagaacctccagcagcgccctctggtgtgggacctaatacaatggctgcaggcggtggcgcaccaatggcagacaataacgaaggcgccgacggagtgggtagttcctcgggaaattggcattgcgattccacatggctgggcgacagagtcatcaccaccagcacccgaacctgggccctgcccacctacaacaaccacctctacaagcaaatctccaacgggacatcgggaggagccaccaacgacaacacctacttcggctacagcaccccctgggggtattttgactttaacagattccactgccacttttcaccacgtgactggcagcgactcatcaacaacaactggggattccggcccaagagactcagcttcaagctcttcaacatccaggtcaaggaggtcacgcagaatgaaggcaccaagaccatcgccaataacctcaccagcaccatccaggtgtttacggactcggagtaccagctgccgtacgttctcggctctgcccaccagggctgcctgcctccgttcccggcggacgtgttcatgattccccagtacggctacctaacactcaacaacggtagtcaggccgtgggacgctcctccttctactgcctggaatactttccttcgcagatgctgagaaccggcaacaacttccagtttacttacaccttcgaggacgtgcctttccacagcagctacgcccacagccagagcttggaccggctgatgaatcctctgattgaccagtacctgtactacttgtctcggactcaaacaacaggaggcacggcaaatacgcagactctgggcttcagccaaggtgggcctaatacaatggccaatcaggcaaagaactggctgccaggaccctgttaccgccaacaacgcgtctcaacgacaaccgggcaaaacaacaatagcaactttgcctggactgctgggaccaaataccatctgaatggaagaaattcattggctaatcctggcatcgctatggcaacacacaaagacgacgaggagcgttttttcccagtaacgggatcctgtttttggcaacaaaatgctgccagagacaatgcggattacagcgatgtcatgctcaccagcgaggaagaaatcaaaaccactaaccctgtggctacagaggaatacggtatcgtggcagataacttgcagcagcaaaacacggctcctcaaattggaactgtcaacagccagggggccttacccggtatggtctggcagaaccgggacgtgtacctgcagggtcccatctgggccaagattcctcacacggacggcaacttccacccgtctccgctgatgggcggctttggcctgaaacatcctccgcctcagatcctgatcaagaacacgcctgtacctgcggatcctccgaccaccttcaaccagtcaaagctgaactctttcatcacgcaatacagcaccggacaggtcagcgtggaaattgaatgggagctacagaaggaaaacagcaagcgctggaaccccgagatccagtacacctccaactactacaaatctacaagtgtggactttgctgttaatacagaaggcgtgtactctgaaccccgccccattggcacccgttacctcacccgtaatctgtaa

SEQ ID NO: 5028 - protein, 736 aa, Adeno-associated virus
MAADGYLPDWLEDNLSEGIREWWDLKPGAPKPKANQQKQDDGRGLVLPGYKYLGPFNGLDKGEPVNAADAAALEHDKAYDQQLEAGDNPYLRYNHADAEFQERLQEDTSFGGNLGRAVFQAKKRVLEPLGLVEEGAKTAPGKKRPVEQSPQEPDSSSGIGKKGQQPARKRLNFGQTGDSESVPDPQPLGEPPAAPSGVGPNTMAAGGGAPMADNNEGADGVGSSSGNWHCDSTWLGDRVITTSTRTWALPTYNNHLYKQISNGTSGGATNDNTYFGYSTPWGYFDFNRFHCHFSPRDWQRLINNNWGFRPKRLSFKLFNIQVKEVTQNEGTKTIANNLTSTIQVFTDSEYQLPYVLGSAHQGCLPPFPADVFMIPQYGYLTLNNGSQAVGRSSFYCLEYFPSQMLRTGNNFQFTYTFEDVPFHSSYAHSQSLDRLMNPLIDQYLYYLSRTQTTGGTANTQTLGFSQGGPNTMANQAKNWLPGPCYRQQRVSTTTGQNNNSNFAWTAGTKYHLNGRNSLANPGIAMATHKDDEERFFPVTGSCFWQQNAARDNADYSDVMLTSEEEIKTTNPVATEEYGIVADNLQQQNTAPQIGTVNSQGALPGMVWQNRDVYLQGPIWAKIPHTDGNFHPSPLMGGFGLKHPPPQILIKNTPVPADPPTTFNQSKLNSFITQYSTGQVSVEIEWELQKENSKRWNPEIQYTSNYYKSTSVDFAVNTEGVYSEPRPIGTRYLTRNL

SEQ ID NO: 5029 - DNA, 2214 bp, Adeno-associated virus
atggctgctgacggttatcttccagattggctcgaggacaacctctctgagggcattcgcgagtggtgggacctgaaacctggagcccccaagcccaaggccaaccagcagaagcaggacgacggccggggtctggtgcttcctggctacaagtacctcggacccttcaacggactcgacaagggggagcccgtcagcgcggcggacgcagcggccctcgagcacgacaaggcctgcgaccagcggctcaaagcgggtgacaatccgtacctgcggtataaccacgccgacgccgagtttcaggagcgtctgcaagaagatacgtcttttgggggcaacctcgggcgagcagtcttccaggccaagaagcgggttctcgaacctctcggtctggttgaggaagctgctaagacggctcctggaaagaagggaccggtagaaccgtcacctcagcgttcccccgactcctccacgggcatcggcaagaaaggccagcagcccgctagaaagagactgaactttgggcagactggcgactcagagtcagtccccgaccctcaaccaatcggagaaccaccagcaggcccctctggtctgggatctggtacaatggctgcaggcggtggcgcaccaatggctgacaataacgagggcgccgacggagtgggtaatgcctcaggaaattggcattgcgattccacatggctgggcgacagagtcatcaccaccagcacccgaacctgggctttgcccacctacaacaatcacctctacaagcaaatctccagtcagtcagcaggtagcaccaacgacaacgtctacttcggctacagcaccccctgggggtattttgacttcaacagattccactgtcacttctcaccacgtgactggcagcggctcatcaacaacaactggggattccggcccaagaagctcaacttcaagctgttcaacatccaggtcaaggaggtcacaacgaatgacggcgtcacgaccatcgccaataaccttaccagcacggttcaggtcttttcggactcggaataccagctgccctacgtcctcggctccgcacaccagggctgcctgcctccgttcccggcggacgtcttcatgattccccagtacggctacctgactctgaacaatggcagccaatcggtgggtcgttcctctttctactgcctggaatatttcccttctcaaatgctgagaacgggcaacaacttcaccttcagctacaccttcgaggacgttcccttccacagcagctacgcacacagccagagcctggaccggctgatgaatcctcttatcgaccagtacctgtattacctggccagaacacagagcaacgcaggaggcacagctggcaatcgggaactgcagttttatcagggcgggcctaccaccatggccgaacaagccaaaaactggctgcctggaccttgcttccggcaacaaagagtctccaagacgctggatcaaaacaacaacagcaactttgcttggactggtgccaccaaataccatctaaatggaagaaattcattggttaatcccggtgtcgccatggcaacccacaaggacgacgaggaacgcttcttcccttcgagcggagtcctgatttttggaaaaactggagcagctaataagactacactggaaaatgtgttaatgacaaatgaagaggaaattcgtcctaccaacccggtagccaccgaggaatacgggactgttagcagcaacctgcaggcggctaacactgcagcccagacacaagttgtcaacaaccagggagccttacctggtatggtctggcagaaccgggacgtgtacctgcagggtcccatctgggccaagattcctcacacggacggcaactttcacccgtctccgctgatgggcggctttggactgaagcatccgcctcctcagatcctgatcaaaaacactcctgttcctgctaatcccccggaggtgtttacgcctgccaagtttgcttctttcatcacacagtacagcaccggccaggtcagcgtggagatcgagtgggagctgcagaaggagaacagcaagcgctggaacccagagattcagtatacctccaattttgacgaacagactggtgtggactttgccgttgacagccagggtgtttattctgagcctcgccccattggtactcgttacctcacccgtaatctgtaa

SEQ ID NO: 5030 - protein, 737 aa, Adeno-associated virus
MAADGYLPDWLEDNLSEGIREWWDLKPGAPKPKANQQKQDDGRGLVLPGYKYLGPFNGLDKGEPVSAADAAALEHDKACDQRLKAGDNPYLRYNHADAEFQERLQEDTSFGGNLGRAVFQAKKRVLEPLGLVEEAAKTAPGKKGPVEPSPQRSPDSSTGIGKKGQQPARKRLNFGQTGDSESVPDPQPIGEPPAGPSGLGSGTMAAGGGAPMADNNEGADGVGNASGNWHCDSTWLGDRVITTSTRTWALPTYNNHLYKQISSQSAGSTNDNVYFGYSTPWGYFDFNRFHCHFSPRDWQRLINNNWGFRPKKLNFKLFNIQVKEVTTNDGVTTIANNLTSTVQVFSDSEYQLPYVLGSAHQGCLPPFPADVFMIPQYGYLTLNNGSQSVGRSSFYCLEYFPSQMLRTGNNFTFSYTFEDVPFHSSYAHSQSLDRLMNPLIDQYLYYLARTQSNAGGTAGNRELQFYQGGPTTMAEQAKNWLPGPCFRQQRVSKTLDQNNNSNFAWTGATKYHLNGRNSLVNPGVAMATHKDDEERFFPSSGVLIFGKTGAANKTTLENVLMTNEEEIRPTNPVATEEYGTVSSNLQAANTAAQTQVVNNQGALPGMVWQNRDVYLQGPIWAKIPHTDGNFHPSPLMGGFGLKHPPPQILIKNTPVPANPPEVFTPAKFASFITQYSTGQVSVEIEWELQKENSKRWNPEIQYTSNFDEQTGVDFAVDSQGVYSEPRPIGTRYLTRNL

SEQ ID NO: 5031 - DNA, 2214 bp, Adeno-associated virus
atggctgccgatggttatcttccagattggctcgaggacaacctctctgagggcattcgcgagtggtgggacctgaaacctggagccccgaaacccaaagccaaccagcaaaagcaggacgacggccggggtctggtgcttcctggctacaagtacctcggacccttcaacggactcgacaagggggagcccgtcaacgcggcggacgcagcggccctcgagcacgacaaggcctacgaccagcagctcaaagcgggtgacaatccgtacctgcggtataaccacgccgacgccgagtttcaggagcgtctgcaagaagatacgtcttttgggggcaacctcgggcgagcagtcttccaggccaagaagcgggttctcgaacctctcggtctggttgaggaagctgctaagacggctcctggaaagaagagaccggtagaaccgtcacctcagcgttcccccgactcctccacgggcatcggcaagaaaggccagcagcccgctagaaagagactgaactttgggcagactggcgactcagagtcagtccccgaccctcaaccaatcggagaaccaccagcaggcccctctggtctgggatctggtacaatggctgcaggcggtggcgctccaatggcagacaataacgaaggcgccgacggagtgggtaatgcctcaggaaattggcattgcgattccacatggctgggcgacagagtcatcaccaccagcacccgaacctgggctttgcccacctacaacaaccacctctacaagcaaatctccagtcagtcagcaggtagcaccaacgacaacgtctacttcggctacagcaccccctgggggtattttgacttcaacagattccactgtcacttctcaccacgtgactggcagcggctcatcaacaacaactggggattccggcccaagaagctcaacttcaagctgttcaacatccaggtcaaggaggtcacaacgaatgacggcgtcacgaccatcgccaataaccttaccagcacggttcaggtcttttcggactcggaataccagctgccctacgtcctcggctccgcacaccagggctgcctgcctccgttcccggcggacgtcttcatgattcctcagtacggctacctgactctcaacaacggtagtcaggccgtgggacgttcctccttctactgcctggagtacttcccctctcagatgctgagaacgggcaacaacttttccttcagctacactttcgaggacgtgcctttccacagcagctacgcgcacagccagagtttggacaggctgatgaatcctctcatcgaccagtacctgtactacctgtcaagaacccagtctacgggaggcacagcgggaacccagcagttgctgttttctcaggccgggcctagcaacatgtcgactcaggccagaaactggctgcctggaccctgctacagacagcagcgcgtctccacgacactgtcgcaaaacaacaacagcaactttgcctggactggtgccaccaagtatcatctgaacggcagagactctctggtgaatccgggcgtcgccatggcaaccaacaaggacgacgaggaccgcttcttcccatccagcggcatcctcatgtttggcaagcagggagctggaaaagacaacgtggactatagcaacgtgatgctaaccagcgaggaagaaatcaagaccaccaaccccgtggccacagaacagtatggcgtggtggctgataacctacagcagcaaaacaccgctcctattgtgggggccgtcaacagccagggagccttacctggcatggtctggcagaaccgggacgtgtacctgcagggtcctatttgggccaagattcctcacacagatggcaactttcacccgtctcctttaatgggcggctttggacttaaacatccgcctcctcagatccttatcaaaaacactcctgttcctgcggatcctccaacagcgttcaaccaggccaagctgaattctttcatcacgcagtacagcaccggacaagtcagcgtggagatcgagtgggagctgcagaaggagaacagcaagcgctggaacccagagattcagtatacttccaactactacaaatctacaaatgtggactttgctgttaatactgagggtgcttactctgagcctcgccccattggcactcgttacctcacccgtaatctgtaa

SEQ ID NO: 5032 - protein, 737 aa, Adeno-associated virus
MAADGYLPDWLEDNLSEGIREWWDLKPGAPKPKANQQKQDDGRGLVLPGYKYLGPFNGLDKGEPVNAADAAALEHDKAYDQQLKAGDNPYLRYNHADAEFQERLQEDTSFGGNLGRAVFQAKKRVLEPLGLVEEAAKTAPGKKRPVEPSPQRSPDSSTGIGKKGQQPARKRLNFGQTGDSESVPDPQPIGEPPAGPSGLGSGTMAAGGGAPMADNNEGADGVGNASGNWHCDSTWLGDRVITTSTRTWALPTYNNHLYKQISSQSAGSTNDNVYFGYSTPWGYFDFNRFHCHFSPRDWQRLINNNWGFRPKKLNFKLFNIQVKEVTTNDGVTTIANNLTSTVQVFSDSEYQLPYVLGSAHQGCLPPFPADVFMIPQYGYLTLNNGSQAVGRSSFYCLEYFPSQMLRTGNNFSFSYTFEDVPFHSSYAHSQSLDRLMNPLIDQYLYYLSRTQSTGGTAGTQQLLFSQAGPSNMSTQARNWLPGPCYRQQRVSTTLSQNNNSNFAWTGATKYHLNGRDSLVNPGVAMATNKDDEDRFFPSSGILMFGKQGAGKDNVDYSNVMLTSEEEIKTTNPVATEQYGVVADNLQQQNTAPIVGAVNSQGALPGMVWQNRDVYLQGPIWAKIPHTDGNFHPSPLMGGFGLKHPPPQILIKNTPVPADPPTAFNQAKLNSFITQYSTGQVSVEIEWELQKENSKRWNPEIQYTSNYYKSTNVDFAVNTEGAYSEPRPIGTRYLTRNL

SEQ ID NO: 5033 - DNA, 2217 bp, Adeno-associated virus
atggctgccgatggttatcttccagattggctcgaggacaacctctctgagggcattcgcgagtggtgggacctgaaacctggagccccgaaacccaaagccaaccagcaaaagcaggacgacggccggggtctggtgcttcctggctacaagtacctcggacccttcaacggactcgacaagggggagcccgtcaacgcggcggacgcagcggccctcgagcacgacaaggcctacgaccagcagctcaaagcgggtgacaatccgtacctgcggtataatcacgccgacgccgagtttcaggagcgtctgcaagaagatacgtcttttgggggcaacctcgggcgagcagtcttccaggccaagaagcgggttctcgaacctctcggtctggttgaggaaggcgctaagacggctcctggaaagaagagaccggtagagccgtcaccacagcgttcccccgactcctccacgggcatcggcaagaaaggccagcagcccgccagaaagagactcaatttcggtcagactggcgactcagagtcagtccccgaccctcaacctatcggagaacctccagcagcgccctctagtgtgggatctggtacaatggctgcaggcggtggcgcaccaatggcagacaataacgaaggtgccgacggagtgggtagttcctcgggaaattggcattgcgattccacatggctgggcgacagagtcatcaccaccagcacccgaacctgggccctgcccacctacaacaaccacctctacaagcaaatctccaacgggacctcgggaggcagcaccaacgacaacacctactttggctacagcaccccctgggggtattttgactttaacagattccactgccacttctcaccacgtgactggcagcgactcatcaacaacaactggggattccggcccaagagactcagcttcaagctcttcaacatccaggtcaaagaggtcacgcagaatgaaggcaccaagaccatcgccaataacctcaccagcaccatccaggtgtttacggactcggaataccagctgccgtacgtcctcggctctgcccaccagggctgcctgcctccgttcccggcggacgtcttcatgattcctcagtacggctacctgactctcaacaacggtagtcaggccgtgggacgttcctccttctactgcctggagtacttcccctctcagatgctgagaacgggcaacaacttttccttcagctacactttcgaggacgtgcctttccacagcagctacgcgcacagccagagtttggacaggctgatgaatcctctcatcgaccagtacctgtactacctgtcaagaacccagtctacgggaggcacagcgggaacccagcagttgctgttttctcaggccgggcctagcaacatgtcggctcaggccagaaactggctgcctggaccctgctacagacagcagcgcgtctccacgacactgtcgcaaaacaacaacagcaactttgcctggactggtgccaccaagtatcatctgaacggcagagactctctggtgaatccgggcgtcgccatggcaaccaacaaggacgacgaggaccgcttcttcccatccagcggcatcctcatgtttggcaagcagggagctggaaaagacaacgtggactatagcaacgtgatgctaaccagcgaggaagaaatcaaggccaccaaccccgtggccacagaacagtatggcgtggtggctgataacctacagcagcaaaacaccgctcctattgtgggggccgtcaacagccagggagccttacctggcatggtctggcagaaccgggacgtgtacctgcagggtcctatttgggccaagattcctcacacagatggcaactttcacccgtctcctttaatgggcggctttggacttaaacatccgcctcctcagatcctcatcaaaaacactcctgttcctgcggatcctccaacagcgttcaaccaggccaagctgaattctttcatcacgcagtacagcaccggacaagtcagcgtggagatcgagtgggagctgcagaaggagaacagcaagcgctggaacccagagattcagtatacttccaactactacaaatctacaaatgtggactttgctgttaatactgagggtgtttactctgagcctcgccccattggcactcgttacctcacccgtaatctgtaa

SEQ ID NO: 5034 - protein, 738 aa, Adeno-associated virus
MAADGYLPDWLEDNLSEGIREWWDLKPGAPKPKANQQKQDDGRGLVLPGYKYLGPFNGLDKGEPVNAADAAALEHDKAYDQQLKAGDNPYLRYNHADAEFQERLQEDTSFGGNLGRAVFQAKKRVLEPLGLVEEGAKTAPGKKRPVEPSPQRSPDSSTGIGKKGQQPARKRLNFGQTGDSESVPDPQPIGEPPAAPSSVGSGTMAAGGGAPMADNNEGADGVGSSSGNWHCDSTWLGDRVITTSTRTWALPTYNNHLYKQISNGTSGGSTNDNTYFGYSTPWGYFDFNRFHCHFSPRDWQRLINNNWGFRPKRLSFKLFNIQVKEVTQNEGTKTIANNLTSTIQVFTDSEYQLPYVLGSAHQGCLPPFPADVFMIPQYGYLTLNNGSQAVGRSSFYCLEYFPSQMLRTGNNFSFSYTFEDVPFHSSYAHSQSLDRLMNPLIDQYLYYLSRTQSTGGTAGTQQLLFSQAGPSNMSAQARNWLPGPCYRQQRVSTTLSQNNNSNFAWTGATKYHLNGRDSLVNPGVAMATNKDDEDRFFPSSGILMFGKQGAGKDNVDYSNVMLTSEEEIKATNPVATEQYGVVADNLQQQNTAPIVGAVNSQGALPGMVWQNRDVYLQGPIWAKIPHTDGNFHPSPLMGGFGLKHPPPQILIKNTPVPADPPTAFNQAKLNSFITQYSTGQVSVEIEWELQKENSKRWNPEIQYTSNYYKSTNVDFAVNTEGVYSEPRPIGTRYLTRNL

SEQ ID NO: 5035 - DNA, 2217 bp, Adeno-associated virus
atggctgccgatggttatcttccagattggctcgaggacaacctctctgagggcattcgcgagtggtgggacctgaaacctggagccccgaaacccaaagccaaccagcaaaagcaggacgacggccggggtctggtgcttcctggctacaagcacctcggacccttcaacggactcgacaagggggagcccgtcaacgcggcggacgcagcggccctcgagcacgacaaggcctacgaccagcagctcaaagcgggtgacaatccgtacctgcggtataatcacgctgacgccgagtttcaggagcgtctgcaagaagatacgtcttttgggggcaacctcgggcgagcagtcttccaggccaagaagcgggttctcgaacctctcggtctggttgaggaaggcgctaagacggctcctggaaagaagagaccggtagagccgtcaccacagcgttcccccgactcctccacgggcatcggcaagaaaggccagcagcccgccagaaagagactcaatttcggtcagactggcgactcagagtcagtccccgaccctcaacctatcggagaacctccagcagcgccctctagtgtgggatctggtacaatggctgcaggcggtggcgcaccaatggcagacaataacgaaggtgccgacggagtgggtagttcctcgggaaattggcattgcgattccacatggctgggcgacagagtcatcaccaccagcacccgaacctgggccctgcccacctacaacaaccacctctacaagcaaatctccaacgggacctcgggaggcagcaccaacgacaacacctactttggctacagcaccccctgggggtattttgactttaacagattccactgccacttctcaccacgtgactggcagcgactcatcaacaacaactggggattccggcccaagagactcagcttcaagctcttcaacatccaggtcaaagaggtcacgcagaatgaaggcaccaagaccatcgccaataaccttaccagcacggttcaggtcttttcggactcggaataccagctgccctacgtcctcggctccgcacaccagggctgcctgcctccgttcccggcggacgtcttcatgattccccagtacggctacctgactctgaacaatggcagccaatcggtgggtcgttcctctttctactgcctggaatatttcccttctcaaatgctgagaacgggcaacaacttcaccttcagctacaccttcgaggacgttcccttccacagcagctacgcacacagccagagcctggaccggctgatgaatcctcttatcgaccagtacctgtattacctggccagaacacagagcaacgcaggaggcacagctggcaatcgggaactgcagttttatcagggcgggcctaccaccatggccgaacaagccaaaaactggctgcctggaccttgcttccggcaacaaagagtctccaagacgctggatcaaaacaacaacagcaactttgcttggactggtgccaccaaataccatctaaatggaagaaattcattggttaatcccggtgtcgccatggcaacccacaaggacgacgaggaacgcttcttcccttcgagcggagtcctgatttttggaaaaactggagcagctaataagactacactggaaaatgtgttaatgacaaatgaagaggaaattcgtcctaccaacccggtagccaccgaggaatacgggactgttagcagcaacctgcaggcggctaacactgcagcccagacacaagttgtcaacaaccagggagccttacctggtatggtctggcagaaccgggacgtgtacctgcagggtcccatctgggccaagattcctcacacggacggcaactttcacccgtctccgctgatgggcggctttggactgaagcatccgcctcctcagatcctgatcaaaaacactcctgttcctgctaatcccccggaggtgtttacgcctgccaagtttgcttctttcatcacacagtacagcaccggccaggtcagcgtggagatcgagtgggagctgcagaaggagaacagcaagcgctggaacccagagattcagtatacctccaattttgacaaacagactggtgtggactttgccgttgacagccagggtgtttattctgagcctcgccccattggtactcgttacctcacccgtaatctgtaa

SEQ ID NO: 5036 - protein, 738 aa, Adeno-associated virus
MAADGYLPDWLEDNLSEGIREWWDLKPGAPKPKANQQKQDDGRGLVLPGYKHLGPFNGLDKGEPVNAADAAALEHDKAYDQQLKAGDNPYLRYNHADAEFQERLQEDTSFGGNLGRAVFQAKKRVLEPLGLVEEGAKTAPGKKRPVEPSPQRSPDSSTGIGKKGQQPARKRLNFGQTGDSESVPDPQPIGEPPAAPSSVGSGTMAAGGGAPMADNNEGADGVGSSSGNWHCDSTWLGDRVITTSTRTWALPTYNNHLYKQISNGTSGGSTNDNTYFGYSTPWGYFDFNRFHCHFSPRDWQRLINNNWGFRPKRLSFKLFNIQVKEVTQNEGTKTIANNLTSTVQVFSDSEYQLPYVLGSAHQGCLPPFPADVFMIPQYGYLTLNNGSQSVGRSSFYCLEYFPSQMLRTGNNFTFSYTFEDVPFHSSYAHSQSLDRLMNPLIDQYLYYLARTQSNAGGTAGNRELQFYQGGPTTMAEQAKNWLPGPCFRQQRVSKTLDQNNNSNFAWTGATKYHLNGRNSLVNPGVAMATHKDDEERFFPSSGVLIFGKTGAANKTTLENVLMTNEEEIRPTNPVATEEYGTVSSNLQAANTAAQTQVVNNQGALPGMVWQNRDVYLQGPIWAKIPHTDGNFHPSPLMGGFGLKHPPPQILIKNTPVPANPPEVFTPAKFASFITQYSTGQVSVEIEWELQKENSKRWNPEIQYTSNFDKQTGVDFAVDSQGVYSEPRPIGTRYLTRNL

SEQ ID NO: 5037 - protein, 737 aa, Adeno-associated virus
MAADGYLPDWLEDNLSEGIREWWDLKPGAPKPKANQQKQDDGRGLVLPGYKYLGPFNGLDKGEPVNAADAAALEHDKAYDQQLKAGDNPYLRYNHADAEFQERLQEDTSFGGNLGRAVFQAKKRVLEPLGLVEEAAKTAPGKKRPVEPSPQRSPDSSTGIGKKGQQPARKRLNFGQTGDSESVPDPQPIGEPPAGPSGLGSGTMAAGGGAPMADNNKGADGVGNASGNWHCDSTWLGDRVITTSTRTWALPTYNNHLYKQISSQSAGSTNDNVYFGYSTPWGYFDFNRFHCHFSPRDWQRLINSNWGFRPKKLNFKLFNIQVKEVTTNDGVTTIANNLTSTVQVFSDSEYQLPYVLGSAHQGCLPPFPADVFMIPQYGYLTLNNGSQSVGRSSFYCLEYFPSQMLRTGNNFTFSYTFEDVPFHSSYAHSQSLDRLMNPLIDQYLYYLARTQSNAGGTAGNRELQFYQGGPTTMAEQAKNWLPGPCFRQQRVSKTLDQNNNSNFAWTGATKYHLNGRNSLVNPGVAMATHKDDEERFFPSSGVLIFGKTGAANKTTLENVLMTNEEEIRPTNPVATEEYGTVSSNLQAANTAAQTQVVNNQGALPGMVWQNRDVYLQGPIWAKIPHTDGNFHPSPLMGGFGLKHPPPQILIKNTPVPANPPEVFTPAKFASFITQYSTGQVSVEIEWELQKENSKRWNPEIQYTSNFDKQTGVDFAVDSQGVYSEPRPIGTRYLTRNL

SEQ ID NO: 5038 - DNA, 2214 bp, Adeno-associated virus
atggctgctgacggttatcttccagattggctcgaggacaacctctctgagggcattcgcgagtggtgggacctgaaacctggagcccccaagcccaaggccaaccagcagaagcaggacgacggccggggtctggtgcttcctggctacaagtacctcggacccttcaacggactcgacaagggggagcccgtcaacgcggcggacgcagcggccctcgagcacgacaaggcctacgaccagcagctcaaagcgggtgacaatccgtacctgcggtataaccacgccgacgccgagtttcaggagcgtctgcaagaagatacgtcttttgggggcaacctcgggcgagcagtcttccaggccaagaagcgggttctcgaacctctcggtctggttgaggaagctgctaagacggctcctggaaagaagagaccggtagaaccgtcacctcagcgttcccccgactcctccacgggcatcggcaagaaaggccagcagcccgctagaaagagactgaactttgggcagactggcgactcagagtcagtccccgaccctcaaccaatcggagaaccaccagcaggcccctctggtctgggatctggtacaatggctgcaggcggtggcgcaccaatggctgacaataacaagggcgccgacggagtgggtaatgcctcaggaaattggcattgcgattccacatggctgggcgacagagtcatcaccaccagcacccgaacctgggctttgcccacctacaacaaccacctctacaagcaaatctccagtcagtcagcaggtagcaccaacgacaacgtctacttcggctacagcaccccctgggggtattttgacttcaacagattccactgtcacttctcaccacgtgactggcagcggctcatcaacagcaactggggattccggcccaagaagctcaacttcaagctgttcaacatccaggtcaaggaggtcacaacgaatgacggcgtcacgaccatcgccaataaccttaccagcacggttcaggtcttttcggactcggaataccagctgccctacgtcctcggctccgcacaccagggctgcctgcctccgttcccggcggacgtcttcatgattccccagtacggctacctgactctgaacaatggcagccaatcggtgggtcgttcctctttctactgcctggaatatttcccttctcaaatgctgagaacgggcaacaacttcaccttcagctacaccttcgaggacgttcccttccacagcagctacgcacacagccagagcctggaccggctgatgaatcctcttatcgaccagtacctgtattacctggccagaacacagagcaacgcaggaggcacagctggcaatcgggaactgcagttttatcagggcgggcctaccaccatggccgaacaagccaaaaactggctgcctggaccttgcttccggcaacaaagagtctccaagacgctggatcaaaacaacaacagcaactttgcttggactggtgccaccaaataccatctaaatggaagaaattcattggttaatcccggtgtcgccatggcaacccacaaggacgacgaggaacgcttcttcccttcgagcggagtcctgatttttggaaaaactggagcagctaataagactacactggaaaatgtgttaatgacaaatgaagaggaaattcgtcctaccaacccggtagccaccgaggaatacgggactgttagcagcaacctgcaggcggctaacactgcagcccagacacaagttgtcaacaaccagggagccttacctggtatggtctggcagaaccgggacgtgtacctgcagggtcccatctgggccaagattcctcacacggacggcaactttcacccgtctccgctgatgggcggctttggactgaagcatccgcctcctcagatcctgatcaaaaacactcctgttcctgctaatcccccggaggtgtttacgcctgccaagtttgcttctttcatcacacagtacagcaccggccaggtcagcgtggagatcgagtgggagctgcagaaggagaacagcaagcgctggaacccagagattcagtatacctccaattttgacaaacagactggtgtggactttgccgttgacagccagggtgtttattctgagcctcgccccattggtactcgttacctcacccgtaatctgtaa

SEQ ID NO: 5039 - protein, 737 aa, Adeno-associated virus
MAADGYLPDWLEDNLSEGIREWWDLKPGAPKPKANQQKQDDGRGLVLPGYKYLGPFNGLDKGEPVNAADAAALEHDKAYDQQLKAGDNPYLRYNHADAEFQERLQEDTSFGGNLGRAVFQAKKRVLEPLGLVEEAAKTAPGKKRPVEPSPQRSPDSSTGIGKKGQQPARKRLNFGQTGDSESVPDPQPIGEPPAGPSGLGSGTMAAGGGAPMADNNEGADGVGNASGNWHCDSTWLGDRVITTSTRTWALPTYNNHLYKQISSQSAGSTNDNVYFGYSTPWGYFDFNRFHCHFSPRDWQRLINSNWGFRPKKLNFKLFNIQVKEVTTNDGVTTIANNLTSTVQVFSDSEYQLPYVLGSAHQGCLPPFPADVFMIPQYGYLTLNNGSQSVGRSSFYCLEYFPSQMLRTGNNFTFSYTFEDVPFHSSYAHSQSLDRLMNPLIDQYLYYLARTQSNAGGTAGNRELQFYQGGPTTMAEQAKNWLPGPCFRQQRVSKTLDQNNNSNFAWTGATKYHLNGRNSLVNPGVAMATHKDDEERFFPSSGVLIFGKTGAANKTTLENVLMTNEEEIRPTNPVATEEYGTVSSNLQAANTAAQTQVVNNQGALPGMVWQNRDVYLQGPIWAKIPHTDGNFHPSPLMGGFGLKHPPPQILIKNTPVPANPPEVFTPAKFASFITQYSTGQVSVEIEWELQKENSKRWNPEIQYTSNFDKQTGVDFAVDSQGVYSEPRPIGTRYLTRNL

SEQ ID NO: 5040 - protein, 737 aa, Adeno-associated virus
MAADGYLPDWLEDNLSEGIREWWDLKPGAPKPKANQQKQDDGRGLVLPGYKYLGPFNGLDKGEPVNAADAAALEHDKAYDQQLKAGDNPYLRYNHADAEFQERLQEDTSFGGNLGRAVFQAKKRVLEPLGLVEEAAKTAPGKKRPVEPSPQRSPDSSTGIGKKGQQPARKRLNFGQTGDSESVPDPQPIGEPPAGPSGLGSGTMAAGGGAPMADNNEGADGVGNASGNWHCDSTWLGDRVITTSTRTWALPTYNNHLYKQISSQSAGSTNDNVYFGYSTPWGYFDFNRFHCHFSPRDWQRLINNNWGFRPKKLNFKLFNIQVKEVTTNDGVTTIANNLTSTVQVFSDSEYQLPYVLGSAHQGCLPPFPADVFMIPQYGYLTLNNGSQSVGRSSFYCLEYFPSQMLRTGNNFTFSYTFEDVPFHSSYAHSQSLDRLMNPLIDQYLYYLARTQSNAGGTAGNRELQFYQGGPTTMAEQAKNWLPGPCFRQQRVSKTLDQNNNSNFAWTGATKYHLNGRNSLVNPGVAMATHKDDEERFFPSSGVLIFGKTGAANKTTLENVLMTNEEEIRPTNPVATEEYGTVSSNLQAANTAAQTQVVNNQGALPGMVWQNRDVYLQGPIWAKIPHTDGNFHPSPLMGGFGLKHPPPQILIKNTPVPANPPEVFTPAKFASFITQYSTGQVSVEIEWELQKENSKRWNPEIQYTSNFDKQTGVDFAVDSQGVYSEPRPIGTRYLTRNL

SEQ ID NO: 5041 - protein, 737 aa, Adeno-associated virus
MAADGYLPDWLEDNLSEGIREWWDLKPGAPKPKANQQKQDDGRGLVLPGYKYLGPFNGLDKGEPVNAADAAALEHDKAYDQQLKAGDNPYLRYNHADAEFQERLQEDTSFGGNLGRAVFQAKKRVLEPLGLVEEAAKTAPGKKRPVEPSPQRSPDSSTGIGKKGQQPARKRLNFGQTGDSESVPDPQPIGEPPAGPSGLGSGTMAAGGGAPMADNNKGADGVGNASGNWHCDSTWLGDRVITTSTRTWALPTYNNHLYKQISSQSAGSTNDNVYFGYSTPWGYFDFNRFHCHFSPRDWQRLINNNWGFRPKKLNFKLFNIQVKEVTTNDGVTTIANNLTSTVQVFSDSEYQLPYVLGSAHQGCLPPFPADVFMIPQYGYLTLNNGSQSVGRSSFYCLEYFPSQMLRTGNNFTFSYTFEDVPFHSSYAHSQSLDRLMNPLIDQYLYYLARTQSNAGGTAGNRELQFYQGGPTTMAEQAKNWLPGPCFRQQRVSKTLDQNNNSNFAWTGATKYHLNGRNSLVNPGVAMATHKDDEERFFPSSGVLIFGKTGAANKTTLENVLMTNEEEIRPTNPVATEEYGTVSSNLQAANTAAQTQVVNNQGALPGMVWQNRDVYLQGPIWAKIPHTDGNFHPSPLMGGFGLKHPPPQILIKNTPVPANPPEVFTPAKFASFITQYSTGQVSVEIEWELQKENSKRWNPEIQYTSNFDKQTGVDFAVDSQGVYSEPRPIGTRYLTRNL

SEQ ID NO: 5042 - DNA, 2217 bp, Adeno-associated virus
atggctgccgatggttatcttccagattggctcgaggacaacctctctgagggcattcgcgagtggtgggacctgaaacctggagccccgaaacccaaagccaaccagcaaaagcaggacgacggccggggtctggtgcttcctggctacaagtacctcggacccttcaacggactcgacaagggggagcccgtcaacgcggcggacgcagcggccctcgagcacgacaaggcctacgaccagcagctcaaagcgggtgacaatccgcacctgcggtataatcacgccgacgccgagtttcaggagcgtctgcaagaagatacgtcttttgggggcaacctcgggcgagcagtcttccaggccaagaagcgggttctcgaacctctcggtctggttgaggaaggcgctaagacggctcctggaaagaagagaccggtagagccgtcaccacagcgttcccccgactcctccacgggcatcggcaagaaaggccagcagcccgccagaaagagactcaatttcggtcagactggcgactcagagtcagtccccgaccctcaacttatcggagaacctccagcagcgccctctagtgtgggatctggtacaatggctgcaggcggtggcgcaccaatggcagacaataacgaaggtgccgacggagtgggtagttcctcgggaaattggcattgcgattccacatggctgggcgacagagtcatcaccaccagcacccgaacctgggccctgcccacctacaacaaccacctctacaagcaaatctccaacgggacctcgggaggcagcaccaacgacaacacctactttggctacagcaccccctgggggtattttgactttaacagattccactgccacttctcaccacgtgactggcagcgactcatcaacaacaactggggattccggcccaagagactcagcttcaagctcttcaacatccaggtcaaagaggtcacgcagaatgaaggcaccaagaccatcgccaataacctcaccagcaccatccaggtgtttacggactcggagtaccagctgccgtacgtcctcggctctgcccaccagggctgcctgcctccgttcccggcggacgtcttcatgattcctcagtacggcaacctgactctcaacaacggtagtcaggccgtgggacgttcctccttctactgcctggagtacttcccctctcagatgctgagaacgggcaacaacttttccttcagctacactttcgaggacgtgcctttccacagcagctacgcgcacagccagagtttggacaggctgatgaatcctctcatcgaccagtacctgtactacctgtcaagaacccagtctacgggaggcacagcgggaacccagcagttgctgttttctcaggccgggcctagcaacatgtcggctcaggccagaaactggctgcctggaccctgctacagacagcagcgcgtctccacgacactgtcgcaaaacaacaacagcaactttgcctggactggtgccaccaagtatcatctgaacggcagagactctctggtgaatccgggcgtcgccatggcaaccaacaaggacgacgaggaccgcttcttcccatccagcggcatcctcatgtttggcaagcagggagctggaaaagacaacatgggctatagcaacgtgatgctaaccagcgaggaagaaatcaagaccaccaaccccgtggccacagaacagtatggcgtggtggctgataacctacagcagcaaaacaccgctcctattgtgggggccgtcaacagccagggagccttacctggcatggtctggcagaaccgggacgtgtacctgcagggtcctatttgggccaagattcctcacacagatggcaactttcacccgtctcctttaatgggcggctttggacttaaacatccgcctcctcagatcctcatcaaaaacactcctgttcctgcggatcctccaacagcgttcaaccaggccaagctgaattctttcatcacgcagtacggcaccggacaagtcagcgtggagatcgagtgggagctgcagaaggagaacagcaagcgctggaacccagagattcagtatacttccaactactacaaatctacaaatgtggactttgctgttaatactgagggtgtttactctgagcctcgccccattggcactcgttacctcacccgtaatctgtaa

SEQ ID NO: 5043 - protein, 738 aa, Adeno-associated virus
MAADGYLPDWLEDNLSEGIREWWDLKPGAPKPKANQQKQDDGRGLVLPGYKYLGPFNGLDKGEPVNAADAAALEHDKAYDQQLKAGDNPHLRYNHADAEFQERLQEDTSFGGNLGRAVFQAKKRVLEPLGLVEEGAKTAPGKKRPVEPSPQRSPDSSTGIGKKGQQPARKRLNFGQTGDSESVPDPQLIGEPPAAPSSVGSGTMAAGGGAPMADNNEGADGVGSSSGNWHCDSTWLGDRVITTSTRTWALPTYNNHLYKQISNGTSGGSTNDNTYFGYSTPWGYFDFNRFHCHFSPRDWQRLINNNWGFRPKRLSFKLFNIQVKEVTQNEGTKTIANNLTSTIQVFTDSEYQLPYVLGSAHQGCLPPFPADVFMIPQYGNLTLNNGSQAVGRSSFYCLEYFPSQMLRTGNNFSFSYTFEDVPFHSSYAHSQSLDRLMNPLIDQYLYYLSRTQSTGGTAGTQQLLFSQAGPSNMSAQARNWLPGPCYRQQRVSTTLSQNNNSNFAWTGATKYHLNGRDSLVNPGVAMATNKDDEDRFFPSSGILMFGKQGAGKDNMGYSNVMLTSEEEIKTTNPVATEQYGVVADNLQQQNTAPIVGAVNSQGALPGMVWQNRDVYLQGPIWAKIPHTDGNFHPSPLMGGFGLKHPPPQILIKNTPVPADPPTAFNQAKLNSFITQYGTGQVSVEIEWELQKENSKRWNPEIQYTSNYYKSTNVDFAVNTEGVYSEPRPIGTRYLTRNL

SEQ ID NO: 5044 - DNA, 2217 bp, Adeno-associated virus
atggctgccgatggttatcttccagattggctcgaggacaacctctctgagggcattcgcgagtggtgggacctgaaacctggagccccgaaacccaaagccaaccagcaaaagcaggacgacggccggggtctggtgcttcctggctacaagtacctcggacccttcaacggactcgacaagggggagcccgtcaacgcggcggacgcagcggccctcgagcacgacaaggcctacgaccagcagctcaaagcgggtgacaatccgtacctgcggtataatcacgccgacgccgagtttcaggagcgtctgcaagaagatacgtcttttgggggcaacctcgggcgagcagtcttccaggccaagaagcgggttctcgaacctctcggtctggttgaggaaggcgctaagacggctcctggaaagaagagaccggtagagccgtcaccacagcgttcccccgactcctccacgggcatcggcaagaaaggccagcagcccgccggaaagagactcaatttcggtcagactggcgactcagagtcagtccccgaccctcaacctatcggagaacctccagcagcgccctctagtgtgggatctggtacaatggctgcaggcggtggcgcaccaatggcagacaataacgaaggtgccgacggagtgggtagttcctcgggaaattggcattgcgattccacatggctgggcgacagagtcatcaccaccagcacccgaacctgggccctgcccacctacaacaaccacctctacaagcaaatctccaacgggacctcgggaggcagcaccaacgacaacacctactttggctacagcaccccctgggggtattttgactttaacagattccactgccacttctcaccacgtgactggcagcgactcatcaacaacaactggggattccggcccaagagactcagcttcaagctcttcaacatccaggtcaaagaggtcacgcagaatgaaggcaccaagaccatcgccaataacctcaccagcaccatccaggtgtttacggactcggaataccagctgccgtacgtcctcggctctgcccaccagggctgcctgcctccgttcccggcggacgtcttcatgattcctcagtacggctacctgactctcaacaacggtagtcaggccgtgggacgttcctccttctactgcctggagtacttcccctctcagatgctgagaacgggcaacaacttttccttcagctacactttcgaggacgtgcctttccacagcagctacgcgcacagccagagtttggacaggctgatgaatcctctcgtcgaccagtacctgtactacctgtcaagaacccagtctacgggaggcacagcgggaacccagcagttgctgttttctcaggccgggcctagcaacatgtcggctcaggccagaaactggctgcctggaccctgctacagacagcagcgcgtctccacgacactgtcgcaaaacaacaacagcaactttgcctggactggtgccaccaagtatcatctgaacggcagagactctctggtgaatccgggcgtcgccatggcaaccaacaaggacgacgaggaccgcttcttcccatccagcggcatcctcatgtttggcaagcagggagctggaaaagacaacgtggactatagcaacgtgatgctaaccagcgaggaagaaatcaagaccaccaaccccgtggccacagaacagtatggcgtggtggctgataacctacagcagcaaaacaccgctcctattgtgggggccgtcaacagccagggagccttacctggcatggtctggcagaaccgggacgtgtacctgcagggtcctatttgggccaagattcctcacacagatggcaactttcacccgtctcctttaatgggcggctttggacttaaacatccgcctcctcagatcctcatcaaaaacactcctgttcctgcggatcctccaacagcgttcaaccaggccaagctgaattctttcatcacgcagtacagcaccggacaagtcagcgtggagatcgagtgggagctgcagaaggagaacagcaagcgctggagcccagagattcagtatacttccaactactacaaatctacaaatgtggactttgctgttaatactgagggtgtttactctgagcctcgccccattggcactcgttacctcacccgtaatctgtaa

SEQ ID NO: 5045 - protein, 738 aa, Adeno-associated virus
MAADGYLPDWLEDNLSEGIREWWDLKPGAPKPKANQQKQDDGRGLVLPGYKYLGPFNGLDKGEPVNAADAAALEHDKAYDQQLKAGDNPYLRYNHADAEFQERLQEDTSFGGNLGRAVFQAKKRVLEPLGLVEEGAKTAPGKKRPVEPSPQRSPDSSTGIGKKGQQPAGKRLNFGQTGDSESVPDPQPIGEPPAAPSSVGSGTMAAGGGAPMADNNEGADGVGSSSGNWHCDSTWLGDRVITTSTRTWALPTYNNHLYKQISNGTSGGSTNDNTYFGYSTPWGYFDFNRFHCHFSPRDWQRLINNNWGFRPKRLSFKLFNIQVKEVTQNEGTKTIANNLTSTIQVFTDSEYQLPYVLGSAHQGCLPPFPADVFMIPQYGYLTLNNGSQAVGRSSFYCLEYFPSQMLRTGNNFSFSYTFEDVPFHSSYAHSQSLDRLMNPLVDQYLYYLSRTQSTGGTAGTQQLLFSQAGPSNMSAQARNWLPGPCYRQQRVSTTLSQNNNSNFAWTGATKYHLNGRDSLVNPGVAMATNKDDEDRFFPSSGILMFGKQGAGKDNVDYSNVMLTSEEEIKTTNPVATEQYGVVADNLQQQNTAPIVGAVNSQGALPGMVWQNRDVYLQGPIWAKIPHTDGNFHPSPLMGGFGLKHPPPQILIKNTPVPADPPTAFNQAKLNSFITQYSTGQVSVEIEWELQKENSKRWSPEIQYTSNYYKSTNVDFAVNTEGVYSEPRPIGTRYLTRNL

SEQ ID NO: 5046 - DNA, 2217 bp, Adeno-associated virus
atggttgccgatggttatcttccagattggctcgaggacaacctctctgagggcattcgcgagtggtgggacctgaaacctggagccccgaaacccaaagccaaccagcaaaagcagggcgacggccggggtctggtgcttcctggctacaagtacctcggacccttcaacggactcgacaagggggagcccgtcaacgcggcggacgcagcggccctcgagcacgacaaggcctacgaccagcagcttaaagcgggtgacaatccgtacctgcggtataatcacgccgacgccgagcttcaggagcgtctgcaagaagatacgtcttttgggggcaacctcgggcgagcagtcttccaggccaagaagcgggttctcgaacctctcggtctggttgaggaaggcgctaagacggctcctggaaagaagagaccggtagagccgtcaccacagcgttcccccgactcctccacgggcatcggcaagaaaggccagcagcccgccagaaagagactcaatttcggtcagactggcgactcagagtcagtccccgaccctcaacctatcggagaacctccagcagcgccctctagtgtgggatctggtacaatggctgcaggcggtggcgcgccaatggcagacaataacgaaggtgccgacggagtgggtagttcctcgggaaattggcattgcgattccacatggctgggcgacagagtcatcaccaccagcacccgaacctgggccctgcccacctacaacaaccacctctacaagcaaatctccaacgggacctcgggaggcagcaccaacgacaacacctactttggctacagcaccccctgggggtattttgactttaacagattccactgccacttctcaccacgtgactggcagcgactcatcaacaacaactggggattccggcccaagagactcagcttcaagctcttcaacatccaggtcaaagaggtcacgcagaatgaaggcaccaagaccatcgccaataacctcaccagcaccatccaggtgtttacggactcggaataccagctgccgtacgtcctcggctctgcccaccagggctgccagcctccgttcccggcggacgtcttcatgattcctcagtacggctacctgactctcaacaacggtagtcaggccgtgggacgttcctccttctactgcctggagtacttcccctctcagatgctgagaacgggcaacaacttttccttcagctacactttcgaggacgtgcctttccacagcagctacgcgcacagccagagtttggacaggctgatgaatcctctcatcgaccagtacctgtactacctgtcaagaacccagtctacgggaggcacagcgggaacccagcagttgctgttttctcaggccgggcctagcaacatgtcggctcaggccagaaactggctgcctggaccctgctacagacagcagcgcgtctccacgacactgtcgcaaaacaacaacagcaactttgcctggactggtgccaccaagtatcatctgaacggcagagactctctggtgaatccgggcgtcgccatggcaaccaacaaggacgacgaggaccgcttcttcccatccagcggcatcctcatgtttggcaagcagggagctggaaaagacaacgtggactatagcaacgtgatgctaaccagcgaggaagaaatcaagaccaccaaccccgtggccacagaacagtatggcgtggtggctgataacctacagcagcaaaacaccgctcctattgtgggggccgtcaacagccagggagccttacctggcatggtctggcagaaccgggacgtgtacctgcagggtcctatttgggccaagattcctcacacagatggcaactttcacccgtctcctttaatgggcggctttggacttaaacatccgcctcctcagatcctcatcaaaaacactcctgttcctgcggatcctccaacagcgttcaaccaggccaagctgaattctttcatcacgcagtacagcaccggacaagtcagcgtggagatcgagtgggagccgcagaaggagaacagcaagcgctggaacccagagattcagtatacttccaactactacaaatctacaaatgtggactttgctgttaatactgagggtgtttactctgagcctcgccccattggcactcgttacctcacccgtaatctgtaa

SEQ ID NO: 5047 - protein, 738 aa, Adeno-associated virus
MVADGYLPDWLEDNLSEGIREWWDLKPGAPKPKANQQKQGDGRGLVLPGYKYLGPFNGLDKGEPVNAADAAALEHDKAYDQQLKAGDNPYLRYNHADAELQERLQEDTSFGGNLGRAVFQAKKRVLEPLGLVEEGAKTAPGKKRPVEPSPQRSPDSSTGIGKKGQQPARKRLNFGQTGDSESVPDPQPIGEPPAAPSSVGSGTMAAGGGAPMADNNEGADGVGSSSGNWHCDSTWLGDRVITTSTRTWALPTYNNHLYKQISNGTSGGSTNDNTYFGYSTPWGYFDFNRFHCHFSPRDWQRLINNNWGFRPKRLSFKLFNIQVKEVTQNEGTKTIANNLTSTIQVFTDSEYQLPYVLGSAHQGCQPPFPADVFMIPQYGYLTLNNGSQAVGRSSFYCLEYFPSQMLRTGNNFSFSYTFEDVPFHSSYAHSQSLDRLMNPLIDQYLYYLSRTQSTGGTAGTQQLLFSQAGPSNMSAQARNWLPGPCYRQQRVSTTLSQNNNSNFAWTGATKYHLNGRDSLVNPGVAMATNKDDEDRFFPSSGILMFGKQGAGKDNVDYSNVMLTSEEEIKTTNPVATEQYGVVADNLQQQNTAPIVGAVNSQGALPGMVWQNRDVYLQGPIWAKIPHTDGNFHPSPLMGGFGLKHPPPQILIKNTPVPADPPTAFNQAKLNSFITQYSTGQVSVEIEWEPQKENSKRWNPEIQYTSNYYKSTNVDFAVNTEGVYSEPRPIGTRYLTRNL

SEQ ID NO: 5048 - DNA, 2217 bp, Adeno-associated virus
atggctgccgatggttatcttccagattggctcgaggacaacctctctgagggcattcgcgagtggtgggacctgaaacctggagccccgaaacccaaagccaaccagcaaaagcaggacgacggccggggtctggtgcttcctggctacaagtacctcggacccttcaacggactcgacaagggggagcccgtcaacgcggcggacgcagcggccctcgagcacgacaaggcctacgaccagcagctcaaagcgggtgacaatccgtacctgcggtataatcacgccgacgccgagtttcaggagcgtctgcaagaagatacgtcttttgggggcaacctcgggcgagcagtcttccaggccaagaagcgggttctcgaacctctcggtctggttgaggaaggcgctaagacggctcctggaaagaagagaccggtagagccgtcaccacagcgttcccccgactcctccacgggcatcggcaagaaaggccagcagcccgccagaaagagactcaatttcggtcagactggcgactcagagtcagtccccgaccctcaacctatcggagaacctccagcagcgccctctagtgtgggatctggtacaatggctgcaggcggtggcgcaccaatggcagacaataacgaaggtgccgacggagtgggtagttcctcgggaaattggcattgcgattccacatggctgggcgacagagtcatcaccaccagcacccgaacctgggccctgcccacctacaacaaccacctctacaagcaaatctccaacgggacctcgggaggcagcaccaacgacaacacctactttggctacagcaccccctgggggtattttgactttaacagattccactgccacttctcaccacgtgactggcagcgactcatcaacaacaactggggattccggcccaagagactcagcttcaagctcttcaacatccaggtcaaagaggtcacgcagaatgaaggcaccaagaccatcgccaatagcctcaccagcaccatccaggtgtttacggactcggaataccagctgccgtacgtcctcggctctgcccaccagggctgcctgcctccgttcccggcggacgtcttcatgattcctcagtacggctacctgactcccaacaacggtagtcaggccgtgggacgttcctccttctactgcctggagtacttcccctctcagatgctgagaacgggcaacaacttttccttcagctacactttcgaggacgtgcctttccacagcagctacgcgcacagccagagtttggacaggctgatgaatcctctcatcgaccagtacctgtactacctgtcaagaacccagtctacgggaggcacagcgggaacccagcagttgctgtcttctcaggccgggcctagcaacatgtcggctcaggccagaaactggctgcctggaccctgctacagacagcagcgcgtctccacgacactgtcgcaaaacaacaacagcaactttgcctggactggtgccaccaagtatcatctgaacggcagagactctctggtgaatccgggcgtcgccatggcaaccaacaaggacgacgaggaccgcttcttcccatccagcggcatcctcatgtttggcaagcagggagctggaaaagacaacgtggactatagcaacgtgatgctaaccagcgaggaagaaatcaagaccaccaaccccgtggccacagaacagtatggcgtggtggctgataacctacagcagcaaaacaccgctcctattgtgggggccgtcaacagccagggagccttacctggcatggtctggcagaaccgggacgtgtacttgcagggtcctatttgggccaagattcctcacacagatggcaactttcacccgtctcctttaatgggcggctttggacttaaacatccgcctcctcagatcctcatcaaaaacactcctgttcctgcggatcctccaacagcgttcaaccaggccaagctgaattctttcatcacgcagtacagcaccggacaagtcagcgtggagatcgagtgggagctgcagaaggagaacagcaagcgctggaacccagagattcagtatacttccaactactacaaatctacaaatgtggactttgctgttaatactgagggtgtttactctgagcctcgccccattggcactcgttacctcacccgtaatctgtaa

SEQ ID NO: 5049 - protein, 738 aa, Adeno-associated virus
MAADGYLPDWLEDNLSEGIREWWDLKPGAPKPKANQQKQDDGRGLVLPGYKYLGPFNGLDKGEPVNAADAAALEHDKAYDQQLKAGDNPYLRYNHADAEFQERLQEDTSFGGNLGRAVFQAKKRVLEPLGLVEEGAKTAPGKKRPVEPSPQRSPDSSTGIGKKGQQPARKRLNFGQTGDSESVPDPQPIGEPPAAPSSVGSGTMAAGGGAPMADNNEGADGVGSSSGNWHCDSTWLGDRVITTSTRTWALPTYNNHLYKQISNGTSGGSTNDNTYFGYSTPWGYFDFNRFHCHFSPRDWQRLINNNWGFRPKRLSFKLFNIQVKEVTQNEGTKTIANSLTSTIQVFTDSEYQLPYVLGSAHQGCLPPFPADVFMIPQYGYLTPNNGSQAVGRSSFYCLEYFPSQMLRTGNNFSFSYTFEDVPFHSSYAHSQSLDRLMNPLIDQYLYYLSRTQSTGGTAGTQQLLSSQAGPSNMSAQARNWLPGPCYRQQRVSTTLSQNNNSNFAWTGATKYHLNGRDSLVNPGVAMATNKDDEDRFFPSSGILMFGKQGAGKDNVDYSNVMLTSEEEIKTTNPVATEQYGVVADNLQQQNTAPIVGAVNSQGALPGMVWQNRDVYLQGPIWAKIPHTDGNFHPSPLMGGFGLKHPPPQILIKNTPVPADPPTAFNQAKLNSFITQYSTGQVSVEIEWELQKENSKRWNPEIQYTSNYYKSTNVDFAVNTEGVYSEPRPIGTRYLTRNL

SEQ ID NO: 5050 - protein, 738 aa, Adeno-associated virus
MAADGYLPDWLEDNLSEGIREWWDLKPGAPKPKANQQKQDDGRGLVLPGYKYLGPFNGLDKGEPVNAADAAALEHDKAYDQQLKAGDNPYLRYNHADAEFQERLQEDTSFGGNLGRAVFQAKKRVLEPLGLVEEGAKTAPGKKRPVEPSPQRSPDSSTGIGKKGQQPARKRLNFGQTGDSESVPDPQPIGEPPAAPSSVGSGTMAAGGGAPMADNNEGADGVGSSSGNWHCDSTWLGDRVITTSTRTWALPTYNNHLYKQISNGTSGGSTNDNTYFGYSTPWGYFDFNRFHCHFSPRDWQRLINNNWGFRPKRLSFKLFNIQVKEVTQNEGTKTIANNLTSTIQVFTDSEYQLPYVLGSAHQGCLPPFPADVFMIPQYGYLTLNNGSQAVGRSSFYCLEYFPSQMLRTGNNFSFSYTFEDVPFHSSYVHSQSLDRLMNPLIDQYLYYLSRTQSTGGTAGTQQLLFSQAGPSNMSAQARNWLPGPCYRQQRVSTTLSQNNNSNFAWTGATKYHLNGRDSLVNSGVAMATNKDDEDRFFPSSGILMFGKQGAGKDNVDYSNVMLTSEEEIKTTNPVATEQYGVVADNLQQQNTAPIVGAVNSQGALPGMVWQNRDVYLQGPIWAKIPHTDGNFHPSPLMGGFGLKHPPPQILIKNTPVPADPPTAFNQAKLNSFITQYSTGQVSVEIEWELQKENSKRWNPEIQYTSNYYKSTNVDFAVNTEGVYSEPRPIGTRYPTRNL

SEQ ID NO: 5051 - DNA, 2217 bp, Adeno-associated virus
atggctgccgatggttatcttccagattggctcgaggacaacctctctgagggcattcgcgagtggtgggacctgaaacctggagccccgaaacccaaagccaaccagcaaaagcaggacgacggccggggtctggtgcttcctggctacaagtacctcggacccttcaacggactcgacaagggggagcccgtcaacgcggcggacgcagcggccctcgagcacgacaaggcctacgaccagcagctcaaagcgggtgacaatccgtacctgcggtataatcacgccgacgccgagtttcaggagcgtctgcaagaagatacgtcttttgggggcaacctcgggcgagcagtcttccaggccaagaagcgggttctcgaacctctcggtctggttgaggaaggcgctaagacggctcctggaaagaagagaccggtagagccgtcaccacagcgttcccccgactcctccacgggcatcggcaagaaaggccagcagcccgccagaaagagactcaatttcggtcagactggcgactcagagtcagtccccgaccctcaacctatcggagaacctccagcagcgccctctagtgtgggatctggtacaatggctgcaggcggtggcgcaccaatggcagacaataacgaaggtgccgacggagtgggtagttcctcgggaaattggcattgcgattccacatggctgggcgacagagtcatcaccaccagcacccgaacctgggccctgcccacctacaacaaccacctctacaagcaaatctccaacgggacctcgggaggcagcaccaacgacaacacctactttggctacagcaccccctgggggtattttgactttaacagattccactgccacttctcaccacgtgactggcagcgactcatcaacaacaactggggattccggcccaagagactcagcttcaagctcttcaacatccaggtcaaagaggtcacgcagaatgaaggcaccaagaccatcgccaataacctcaccagcaccatccaggtgtttacggactcggaataccagctgccgtacgtcctcggctctgcccaccagggctgcctgcctccgttcccggcggacgtcttcatgattcctcagtacggctacctgactctcaacaacggtagtcaggccgtgggacgttcctccttctactgcctggagtacttcccctctcagatgctgagaacgggcaacaacttttccttcagctacactttcgaggacgtgcctttccacagcagctacgtgcacagccagagtttggacaggctgatgaatcctctcatcgaccagtacctgtactacctgtcaagaacccagtctacgggaggcacagcgggaacccagcagttgctgttttctcaggccgggcctagcaacatgtcggctcaggccagaaactggctgcctggaccctgctacagacagcagcgcgtctccacgacactgtcgcaaaacaacaacagcaactttgcctggactggtgccaccaagtatcatctgaacggcagagactctctggtgaattcgggcgtcgccatggcaaccaacaaggacgacgaggaccgcttcttcccatccagcggcatcctcatgtttggcaagcagggagctggaaaagacaacgtggactatagcaacgtgatgctaaccagcgaggaagaaatcaagaccaccaaccccgtggccacagaacagtatggcgtggtggctgataacctacagcagcaaaacaccgctcctattgtgggggccgtcaacagccagggagccttacctggcatggtctggcagaaccgggacgtgtacctgcagggtcctatttgggccaagattcctcacacagatggcaactttcacccgtctcctttaatgggcggctttggacttaaacatccgcctcctcagatcctcatcaaaaacactcctgttcctgcggatcctccaacagcgttcaaccaggccaagctgaattctttcatcacgcagtacagcaccggacaagtcagcgtggagatcgagtgggagctgcagaaggagaacagcaagcgctggaacccagagattcagtatacttccaactactacaaatctacaaatgtggactttgctgttaatactgagggtgtttactctgagcctcgccccattggcactcgttaccccacccgtaatctgtaa

SEQ ID NO: 5052 - protein, 734 aa, Adeno-associated virus; identical to SEQ ID NO: 4948

SEQ ID NO: 5053 - DNA, 2214 bp, Adeno-associated virus
atggctgctgacggttatcttccagattggctcgaggacaacctctctgagggcattcgcgagtggtgggacctgaaacctggagccccgaaacccaaagccaaccagcagaagcaggacgacggccggggtctggtgcttcctggctacaagtacctcggacccttcaacggactcgacaagggggagcccgtcaacgcggcggacgcagcggccctcgagcacgacaaggcctacgaccagcagctcaaagcgggtgacaatccgtacctgcggtataaccacgccgacgccgagtttcaggagcgtctgcaagaagatacgtcttttgggggcaacctcgggcgagcagtcttccaggccaagaagcgggttctcgaacctctcggtctggttgaggaagctgctaagacggctcctggaaagaagagaccggtagaaccgtcacctcagcgttcccccgactcctccacgggcatcggcaagaaaggccagcagcccgctagaaagagactgaactttgggcagactggcgactcagagtcagtccccgaccctcaacctctcggagaaccaccagcaggcccctctggtctgggatctggtacaatggctgcaggcggtggcgctccaatggcagacaataacgaaggcgccgacggagtgggtaatgcctcaggaaattggcattgcgattccacatggctgggcgacagagtcatcaccaccagcacccgaacctgggctttgcccacctacaacaaccacctctacaagcaaatctccagtcagtcagcaggtagcaccaacgacaacgtctacttcggctacagcaccccctgggggtattttgacttcaacagattccactgtcacttctcaccacgtgactggcagcgactcatcaacaacaactggggattccggcccaagaagctcaacttcaagctcttcaacatccaagtcaaggaggtcacgacgaatgacggcgtcacgaccatcgctaataaccttaccagcacggttcaggtcttttcggactcggagtaccagctgccgtacgtcctcggctctgcccaccagggctgcctgcctccgttcccggcggacgtcttcatgattcctcagtacggctacctgactctgaacaatggcagccaatcggtgggacgttcatccttctactgcctggaatacttcccttctcaggtgctgagaacgggtaacaacttcaccttcagttacaccttcgaggacgtgcctttccacagcagctacgcgcacagccagagcctagaccggctgatgaatcccctcatcgaccagtacctgtattacctggctagaacacagagtaacccaggaggcacatctggcaatcgggaactgcagttttaccagggcgggccttccaccatggccgaacaagccaagaactggttacctggaccttgcttccggcaacaaagagtttccaaaacactggatcaaaacaacaacagcaactttgcttggactggtgccaccaaatatcacctgaacggcagaaactcattggtgaatcctggtgtcgccatggcaactcacaaggacgacgaggaccgctttttcccatccagcggagtcctgatttttggaaaaactggagcaaccaacaagactacattggaaaacgtgttaatgacaaatgaagaagaaattcgtcctactaatcctgtggccacagaagaatacgggatagtcagcagcaatttacaagcggccaatactgcagcccagacacaagttgtcaacaaccagggagccttacctggcatggtctggcagaaccgggacgtgtacctgcagggtcccatctgggccaaaattcctcacacagacggcaactttcacccgtctccgctgatgggcggctttggactgaagcatccgcctcctcagatcctgatcaaaaacactcctgttcctgctaatcccccggaggtgtttacgcctgccaagtttgcttctttcatcacacagtacagcaccggccaggtcagcgtggagatcgagtgggagctgcagaaggagaacagcaagcgctggaacccagagattcagtatacctccaattttgacaaacagactggtgtggactttgccgttgacagccagggtgtttattctgagcctcgccccattggtactcgttacctcacccgtaatctgtaa

SEQ ID NO: 5054 - protein, 737 aa, Adeno-associated virus
MAADGYLPDWLEDNLSEGIREWWDLKPGAPKPKANQQKQDDGRGLVLPGYKYLGPFNGLDKGEPVNAADAAALEHDKAYDQQLKAGDNPYLRYNHADAEFQERLQEDTSFGGNLGRAVFQAKKRVLEPLGLVEEAAKTAPGKKRPVEPSPQRSPDSSTGIGKKGQQPARKRLNFGQTGDSESVPDPQPLGEPPAGPSGLGSGTMAAGGGAPMADNNEGADGVGNASGNWHCDSTWLGDRVITTSTRTWALPTYNNHLYKQISSQSAGSTNDNVYFGYSTPWGYFDFNRFHCHFSPRDWQRLINNNWGFRPKKLNFKLFNIQVKEVTTNDGVTTIANNLTSTVQVFSDSEYQLPYVLGSAHQGCLPPFPADVFMIPQYGYLTLNNGSQSVGRSSFYCLEYFPSQVLRTGNNFTFSYTFEDVPFHSSYAHSQSLDRLMNPLIDQYLYYLARTQSNPGGTSGNRELQFYQGGPSTMAEQAKNWLPGPCFRQQRVSKTLDQNNNSNFAWTGATKYHLNGRNSLVNPGVAMATHKDDEDRFFPSSGVLIFGKTGATNKTTLENVLMTNEEEIRPTNPVATEEYGIVSSNLQAANTAAQTQVVNNQGALPGMVWQNRDVYLQGPIWAKIPHTDGNFHPSPLMGGFGLKHPPPQILIKNTPVPANPPEVFTPAKFASFITQYSTGQVSVEIEWELQKENSKRWNPEIQYTSNFDKQTGVDFAVDSQGVYSEPRPIGTRYLTRNL

SEQ ID NO: 5055 - DNA, 2214 bp, Adeno-associated virus
atggctgccgatggttatcttccagattggctcgaggacaacctctctgagggcattcgcgagtggtgggacctgaaacctggagccccgaaacccaaagccaaccagcaaaagcaggacgacggccggggtctggtgcttcctggctacaagtacctcggacccttcaacggactcgacaagggggagcccgtcaacgcggcggacgcagcggccctcgagcacgacaaggcctacgaccagcagctcaaagcgggtgacaatccgtacctgcggtataatcacgccgacgccgagtttcaggagcgtctgcaagaagatacgtcttttgggggcaacctcgggcgagcagtcttccaggccaagaagcgggttctcgaacctctcggtctggttgaggaaggcgctaagacggctcctggaaagaagagaccggtagagccgtcaccacagcgttcccccgactcctccacgggcatcggcaagaaaggccagcagcccgccagaaagagactcaatttcggtcagactggcgactcagagtcagtccccgaccctcaacctatcggagaacctccagcagcgccctctagtgtgggatctggtacaatggctgcaggcggtggcgcaccaatggcagacaataacgaaggtgccgacggagtgggtagttcctcgggaaattggcattgcgattccacacggctgggcgacagagtcatcaccaccagcacccggacctgggctttgcccacctacaacaaccacctctacaagcaaatctccagtcagtcagcaggtagcaccaacgacaacgtctacttcggctacagcaccccctgggggtattttgacttcaacagattccactgtcacttctcaccacgtgactggcagcggctcatcaacaacaactggggattccggcccaagaagctcaacttcaagctgttcaacatccaggtcaaggaggtcacaacgaatgacggcgtcacgaccatcgccaataaccttaccagcacggttcaggtcttttcggactcggaataccagctgccctacgtcctcggctccgcacaccagggctgcctgcctccgttcccggcggacgtcttcatgattccccagtacggctacctgactctgaacaatggcagccaatcggtgggtcgttcctctttctactgcctggaatatttcccttctcaaatgctgagaacgggcaacaacttcaccttcagctacaccttcgaggacgttcccttccacagcagctacgcacacagccagagcctggaccggctgatgaatcctcttatcgaccagtacctgtattacctggccagaacacagagcaacgcaggaggcacagctggcaatcgggaactgcagttttatcagggcgggcctaccaccatggccgaacaagccaaaaactggctgcctggaccttgcttccggcaacgaagagtctccaagacgctggatcaaaacaacaacagcaactttgcttggactggtgccaccaaataccatctaaatggaagaaattcattggttaatcccggtgtcgccatggcaacccacaaggacgacgaggaacgcttcttcccttcgagcggagtcctgatttttggaaaaactggagcagctaataagactacactggaaaatgtgttaatgacaaatgaagaggaaattcgtcctaccaacccggtagccaccgaggaatacgggactgttagcagcaacctgcaggcggctaacactgcagcccagacacaagttgtcaacaaccagggagccttacctggtatggtctggcagaaccgggacgtgtacctgcagggtcccatctgggccaagattcctcacacggacggcaactttcacccgtctccgctgatgggcggctttggactgaagcatccgcctcctcagatcctgatcaaaaacactcctgttcctgctaatcccccggaggtgtttacgcctgccaagtttgcttctttcatcacacagtacagcaccggccaggtcagcgtggagatcgagtgggagctgcagaaggagaacagcaagcgctggaacccagagattcagtatacctccaattttgacaaacagactggtgtggactttgccgttgacagccagggtgtttattctgagcctcgccccattggtactcgttacctcacccgtaatctgtaa

SEQ ID NO: 5056 - protein, 737 aa, Adeno-associated virus
MAADGYLPDWLEDNLSEGIREWWDLKPGAPKPKANQQKQDDGRGLVLPGYKYLGPFNGLDKGEPVNAADAAALEHDKAYDQQLKAGDNPYLRYNHADAEFQERLQEDTSFGGNLGRAVFQAKKRVLEPLGLVEEGAKTAPGKKRPVEPSPQRSPDSSTGIGKKGQQPARKRLNFGQTGDSESVPDPQPIGEPPAAPSSVGSGTMAAGGGAPMADNNEGADGVGSSSGNWHCDSTRLGDRVITTSTRTWALPTYNNHLYKQISSQSAGSTNDNVYFGYSTPWGYFDFNRFHCHFSPRDWQRLINNNWGFRPKKLNFKLFNIQVKEVTTNDGVTTIANNLTSTVQVFSDSEYQLPYVLGSAHQGCLPPFPADVFMIPQYGYLTLNNGSQSVGRSSFYCLEYFPSQMLRTGNNFTFSYTFEDVPFHSSYAHSQSLDRLMNPLIDQYLYYLARTQSNAGGTAGNRELQFYQGGPTTMAEQAKNWLPGPCFRQRRVSKTLDQNNNSNFAWTGATKYHLNGRNSLVNPGVAMATHKDDEERFFPSSGVLIFGKTGAANKTTLENVLMTNEEEIRPTNPVATEEYGTVSSNLQAANTAAQTQVVNNQGALPGMVWQNRDVYLQGPIWAKIPHTDGNFHPSPLMGGFGLKHPPPQILIKNTPVPANPPEVFTPAKFASFITQYSTGQVSVEIEWELQKENSKRWNPEIQYTSNFDKQTGVDFAVDSQGVYSEPRPIGTRYLTRNL

SEQ ID NO: 5057 - DNA, 2208 bp, Adeno-associated virus
atggctgccgatggttatcttccagattggctcgaggacactctctctgaaggaataagacagtggtggaagctcaaacctggcccaccaccaccaaagcccgcagagcggcataaggacgacagcaggggtcttgtgcttcctgggtacaagtacctcggacccttcaacggactcgacaagggggagccggtcaacgaggcagacgccgcggccctcgagcacgacaaggcctacgaccggcagctcgacagcggagacaacccgtacctcaagtacaaccacgccgacgcggagtttcaggagcgtcttaaagaagatacgtcttttgggggcaacctcggacgagcagtcttccaggcgaaaaagagggttcttgaacctctgggcctggttgaggaacctgttaagacggctccgggaaaaaagaggccggtagagcactctcctgcggagccagactcctcctcgggaaccggaaaagcgggccagcagcctgcaagaaaaagattgaattttggtcagactggagacgcagactccgtacctgacccccagcctctcggacagccaccagcagccccctctggtttgggatctactacaatggctacaggcagtggcgcaccaatggcagacaataacgagggtgccgatggagtgggtaattcttcaggaaattggcattgcgattcccaatggctgggcgacagagtcatcaccaccagcacccgaacctgggcccagcccacctacaacaaccacctctacaagcaaatctcaagccaatcaggagcctcaaacgacaaccactactttggctacagcaccccttgggggtattttgacttcaacagattccactgccacttttcaccacgtgactggcaaagactcatcaacaacaactggggattccgacccaagagactcaacttcaagctctttaacattcaagtcaaagaggtcacgcagaatgacggtacgacgacgattgccaataaccttaccagcacggttcaggtgtttactgactcggagtaccagctcccgtacgtcctcgggtcggcgcatcaaggatgcctcccgccgtttccagcggacgtcttcatggtcccacagtatggatacctcaccctgaacaacgggagtcaggcggtaggacgctcttccttttactgcctggagtactttccttctcagatgcttcgtactggaaacaactttcagttcagctacacctttgaagacgttcctttccacagcagctacgctcacagccagagtctggatcggctgatgaatcctctgatcgaccagtacctgtattatctgaacaaaacacaatcaaatagtggagctcttcagcagtctcggctactgtttagtcaagctggacccaccagcatgtctcttcaagctaaaaactggctacctggaccttgctacagacagcagcgtctgtcaaagcaggcaaacgacaacaacaacagcaactttccctggactgcggctacaaagtaccacctaaatggccgggactcgttggttaatccaggaccagctatggccagtcacaaagacgatgaagaaaagtttttccccatgcatggaaccctgatatttggtaaacaaggaacaaatgctaacgacgcggatttggacaatgtcatgattacagatgaagaagaaatccgcaccaccaatcccgtggctacggagcagtacggatatgtgtcaaataatttgcaaaactcaaatactggtccaactactggaactgtcaatcaccgaggagcgttacctggcatggtgtggcaggatcgagacgtgtacctgcagggacccatttgggccaagattcctcacaccgatggacactttcatccttctccactgatgggaggttttgggctcaaacacccgcctcctcagatcatgatcaaaaacactcccgttccagccaatcctcccacaaacttcagttctgccaagtttgcttctttcatcacacagtattccacggggcaggtcagcgtggagatcgagtgggagctgcagaaagagaacagcaaacgctggaatcccgaaattcagtacacttccaactacaacaaatctgttaatgtggactttactgtggacactaatggcgtgtattcagagcctcgccccattggcaccagatacctgactcgtaatctgtaa

SEQ ID NO: 5058 - protein, 735 aa, Adeno-associated virus
MAADGYLPDWLEDTLSEGIRQWWKLKPGPPPPKPAERHKDDSRGLVLPGYKYLGPFNGLDKGEPVNEADAAALEHDKAYDRQLDSGDNPYLKYNHADAEFQERLKEDTSFGGNLGRAVFQAKKRVLEPLGLVEEPVKTAPGKKRPVEHSPAEPDSSSGTGKAGQQPARKRLNFGQTGDADSVPDPQPLGQPPAAPSGLGSTTMATGSGAPMADNNEGADGVGNSSGNWHCDSQWLGDRVITTSTRTWAQPTYNNHLYKQISSQSGASNDNHYFGYSTPWGYFDFNRFHCHFSPRDWQRLINNNWGFRPKRLNFKLFNIQVKEVTQNDGTTTIANNLTSTVQVFTDSEYQLPYVLGSAHQGCLPPFPADVFMVPQYGYLTLNNGSQAVGRSSFYCLEYFPSQMLRTGNNFQFSYTFEDVPFHSSYAHSQSLDRLMNPLIDQYLYYLNKTQSNSGALQQSRLLFSQAGPTSMSLQAKNWLPGPCYRQQRLSKQANDNNNSNFPWTAATKYHLNGRDSLVNPGPAMASHKDDEEKFFPMHGTLIFGKQGTNANDADLDNVMITDEEEIRTTNPVATEQYGYVSNNLQNSNTGPTTGTVNHRGALPGMVWQDRDVYLQGPIWAKIPHTDGHFHPSPLMGGFGLKHPPPQIMIKNTPVPANPPTNFSSAKFASFITQYSTGQVSVEIEWELQKENSKRWNPEIQYTSNYNKSVNVDFTVDTNGVYSEPRPIGTRYLTRNL

SEQ ID NO: 5059 - DNA, 2217 bp, Adeno-associated virus
atggctgccgatggttatcttccagattggctcgaggacaacctctctgagggcattcgcgagtggtgggcgctgaaacctggagccccgaagcccaaagccaaccagcaaaagcaggacgacggccggggtctggtgcttcctggctacaagtacctcggacccttcaacggactcgacaagggggagcccgtcaacgcggcggacgcagcggccctcgagcacgacaaggcctacgaccagcagctgcaggcgggtgacaatccgtacctgcggtataatcacgccgacgccgagtttcaggagcgtctgcaagaagatacgtcttttgggggcaacctcgggcgagcagtcttccaggccaagaagcgggttctcgaacctctcggtctggttgaggaaggcgctaagacggctcctggaaagaagagaccggtagagccgtcaccacagcgttcccccgactcctccacgggcatcggcaagaaaggccagcagcccgccagaaagagactcaatttcggtcagactggcgactcagagtcagtccccgaccctcaacctatcggagaacctccagcagcgccctctagtgtgggatctggtacaatggctgcaggcggtggcgcgccaatggcagacaataacgaaggtgccgacggagtgggtagttcctcgggaaattggcattgcgattccacatggctgggcgacagagtcatcaccaccagcacccgaacctgggccctgcccacctacaacaaccacctctacaagcaaacctccaacgggacctcgggaggcagcaccaacgacaacacctactttggctacagcaccccctgggggtattttgactttaacagattccactgccacttctcaccacgtgactggcagcgactcatcaacaacaactggggattccggcccaagagactcagcttcaagctcttcaacatccaggtcaaagaggtcacgcagaatgaaggcaccaagaccatcgccaataacctcaccagcaccatccaggtgtttacggactcggaataccagctgccgtacgtcctcggctctgcccaccagggctgcctgcctccgttcccggcggacgtcttcatgattcctcagtacggctacctgactctcaacaacggtagtcaggccgtgggacgttcctccttctactgcctggagtacttcccctctcagatgctgagaacgggcaacaacttttccttcagctacactttcgaggacgtgcctttccacagcagctacgcgcacagccagagtttggacaggctgatgaatcctctcatcgaccagtacctgtactacctgtcaagaacccagtctacgggaggcacagcgggaacccagcagttgctgttttctcaggccgggcctagcaacatgtcggctcaggccagaaactggctgcctggaccctgctacagacagcagcgcgtctccacgacactgtcgcaaaacaacaacagcaactttgcctggactggtgccaccaagtatcatctgaacggcagagactctctggtgaatccgggcgtcgccatggcaaccaacaaggacgacgaggaccgcttcttcccatccagcggcatcctcatgtttggcaagcagggagctggaaaagacaacgtggactatagcaacgtgatgctaaccagcgaggaagaaatcaagaccaccaaccccgtggccacagaacagtatggcgtggtggctgataacctacagcagcaaaacaccgctcctattgtgggggccgtcaacagccagggagccttacctggcatggtctggcagaaccgggacgtgtacctgcagggtcctatttgggccaagattcctcacacagatggcaactttcacccgtctcctttaatgggcggctttggacttaaacatccgcctcctcagatcctcatcaaaaacactcctgttcctgcggatcctccaacagcgttcaaccaggccaagctgaattctttcatcacgcagtacagcaccggacaagtcagcgcggagatcgagtgggagctgcagaaggagaacagcaagcgctggaacccagagattcagtatacttccaactactacaaatctacaaatgtggactttgctgttaatactgagggtgtttactctgagcctcgccccattggcactcgttacctcacccgtaatctgtaa

SEQ ID NO: 5060 - protein, 738 aa, Adeno-associated virus
MAADGYLPDWLEDNLSEGIREWWALKPGAPKPKANQQKQDDGRGLVLPGYKYLGPFNGLDKGEPVNAADAAALEHDKAYDQQLQAGDNPYLRYNHADAEFQERLQEDTSFGGNLGRAVFQAKKRVLEPLGLVEEGAKTAPGKKRPVEPSPQRSPDSSTGIGKKGQQPARKRLNFGQTGDSESVPDPQPIGEPPAAPSSVGSGTMAAGGGAPMADNNEGADGVGSSSGNWHCDSTWLGDRVITTSTRTWALPTYNNHLYKQTSNGTSGGSTNDNTYFGYSTPWGYFDFNRFHCHFSPRDWQRLINNNWGFRPKRLSFKLFNIQVKEVTQNEGTKTIANNLTSTIQVFTDSEYQLPYVLGSAHQGCLPPFPADVFMIPQYGYLTLNNGSQAVGRSSFYCLEYFPSQMLRTGNNFSFSYTFEDVPFHSSYAHSQSLDRLMNPLIDQYLYYLSRTQSTGGTAGTQQLLFSQAGPSNMSAQARNWLPGPCYRQQRVSTTLSQNNNSNFAWTGATKYHLNGRDSLVNPGVAMATNKDDEDRFFPSSGILMFGKQGAGKDNVDYSNVMLTSEEEIKTTNPVATEQYGVVADNLQQQNTAPIVGAVNSQGALPGMVWQNRDVYLQGPIWAKIPHTDGNFHPSPLMGGFGLKHPPPQILIKNTPVPADPPTAFNQAKLNSFITQYSTGQVSAEIEWELQKENSKRWNPEIQYTSNYYKSTNVDFAVNTEGVYSEPRPIGTRYLTRNL

SEQ ID NO: 5061 - DNA, 2217 bp, Adeno-associated virus
atggctgctgacggttatcttccagattggctcgaggacaacctctctgagggcattcgcgagtggtgggacctgaaacctggagcccccaagcccaaggccaaccagcagaagcaggacgacggccggggtctggtgcttcctggctacaagtacctcggacccttcaacggactcgacaagggggagcccgtcaacgcggcggacgcagcggccctcgagcacgacaaggcctacgaccagcagctcaaagcgggtgacaatccgtacctgcggtataatcacgccgacgccgagtttcaggagcgtctgcaagaagatacgtcttttgggggcaacctcgggcgagcagtcttccaggccaagaagcgggttctcgaacctctcggtctggttgaggaagctgctaagacggctcctggaaagaagagaccggtagaaccgtcacctcagcgttcccccgactcctccacgggcatcggcaagaaaggccagcagcccgctagaaagagactgaactttgggcagactggcgactcagagtcagtccccgaccctcaaccaatcggagaacctccagcagcgccctctagtgtgggatctggtacaatggccgcaggcggtggcgcaccaatggcagacaataacgaaggtgccgacggagtgggtagttcctcgggaaattggcattgcgattccacatggctgggcgacagagtcatcaccaccagcacccgaacctgggccctgcccacctacaacaaccacctctacaagcaaatctccaacgggacctcgggaggcagcaccaacgacaacacctactttggctacagcaccccctgggggtattttgactttaacagattccactgccacttctcaccacgtgactggcagcgactcatcaacaacaactggggattccggcccaagagactcagcttcaagctcttcaacatccaggtcaaagaggtcacgcagaatgaaggcaccaagaccatcgccaataacctcaccagcaccatccaggtgtttacggactcggaataccagctgccgtacgtcctcggctctgcccaccagggctgcctgcctccgttcccggcggacgtcttcatgattcctcagtacggctacctgactctcaacaacggtagtcaggccgtgggacgttcctccttctactgcctggagtacttcccctctcagatgctgagaacgggcaacaacttttccttcagctacactttcgaggacgtgcctttccacagcagctacgcgcacagccagagtttggacaggctgatgaatcctctcatcgaccagtacctgtactacctgtcaagaacccagtctacgggaggcacagcgggaacccagcagctgctgttttctcaggccgggcctagcaacatgtcggctcaggccagaaactggctgcctggaccctgctacagacagcagcgcgtctccacgacactgtcgcaaaacaacaacagcaactttgcctggactggtgccaccaagtatcatctgaacggcagagactctctggtgaatccgggcgtcgccatggcaaccaacaaggacgacgaggaccgcttcttcccatccagcggcatcctcatgtttggcaagcagggagctggaaaagacaacgtggactatagcaacgtgatgctaaccagcgaggaagaaatcaagaccaccaaccccgtggccacagaacagtatggcgtggtggctgataacctacagcagcaaaacaccgctcctattgtgggggccgtcaacagccagggagccttacctggcatggtctggcagaaccgggacgtgtacctgcagggtcctatttgggccaagattcctcacacagatggcaactttcacccgtctcctttaatgggcggctttggacttaaacatccgcctcctcagatcctcatcaaaagcactcctgttcctgcggatcctccaacagcgttcaaccaggccaagctgaattctttcatcacgcagtacagcaccggacaagtcagcgtggagatcgagtgggagctgcagaaggagaacagcaagtgctggaacccagagattcagtatacttccaactactacaaatctacaaatgtggactttgctgttaatactgagggtgtttactctgagcctcgccccattggcactcgttacctcacccgtaatctgtaa

SEQ ID NO: 5062 - protein, 738 aa, Adeno-associated virus
MAADGYLPDWLEDNLSEGIREWWDLKPGAPKPKANQQKQDDGRGLVLPGYKYLGPFNGLDKGEPVNAADAAALEHDKAYDQQLKAGDNPYLRYNHADAEFQERLQEDTSFGGNLGRAVFQAKKRVLEPLGLVEEAAKTAPGKKRPVEPSPQRSPDSSTGIGKKGQQPARKRLNFGQTGDSESVPDPQPIGEPPAAPSSVGSGTMAAGGGAPMADNNEGADGVGSSSGNWHCDSTWLGDRVITTSTRTWALPTYNNHLYKQISNGTSGGSTNDNTYFGYSTPWGYFDFNRFHCHFSPRDWQRLINNNWGFRPKRLSFKLFNIQVKEVTQNEGTKTIANNLTSTIQVFTDSEYQLPYVLGSAHQGCLPPFPADVFMIPQYGYLTLNNGSQAVGRSSFYCLEYFPSQMLRTGNNFSFSYTFEDVPFHSSYAHSQSLDRLMNPLIDQYLYYLSRTQSTGGTAGTQQLLFSQAGPSNMSAQARNWLPGPCYRQQRVSTTLSQNNNSNFAWTGATKYHLNGRDSLVNPGVAMATNKDDEDRFFPSSGILMFGKQGAGKDNVDYSNVMLTSEEEIKTTNPVATEQYGVVADNLQQQNTAPIVGAVNSQGALPGMVWQNRDVYLQGPIWAKIPHTDGNFHPSPLMGGFGLKHPPPQILIKSTPVPADPPTAFNQAKLNSFITQYSTGQVSVEIEWELQKENSKCWNPEIQYTSNYYKSTNVDFAVNTEGVYSEPRPIGTRYLTRNL

SEQ ID NO: 5063 - protein, 738 aa, Adeno-associated virus
MAADGYLPDWLEDNLSEGIREWWDLKPGAPKPKANQQKQDDGRGLVLPGYKYLGPFNGLDKGEPVNAADAAALEHDKAYDQQLKAGDNPYLRYNHADAEFQERLQEDTSFGGNLGRAVFQAKKRVLEPLGLVEEAAKTAPGKKRPVEPSPQRSPDSSTGIGKKGQQPARKRLNFGQTGDSESVPDPQPIGEPPAAPSSVGSGTMAAGGGAPMADNNEGADGVGSSSGNWHCDSTWLGDRVITTSTRTWALPTYNNHLYKQISNGTSGGSTNDNTYFGYSTPWGYFDFNRFHCHFSPRDWQRLINNNWGFRPKRLSFKLFNIQVKEVTQNEGTKTIANNLTSTIQVFTDSEYQLPYVLGSAHQGCLPPFPADVFMIPQYGYLTLNNGSQAVGRSSFYCLEYFPSQMLRTGNNFSFSYTFEDVPFHSSYAHSQSLDRLMNPLIDQYLYYLSRTQSTGGTAGTQQLLFSQAGPSNMSAQARNWLPGPCYRQQRVSTTLSQNNNSNFAWTGATKYHLNGRDSLVNPGVAMATNKDDEDRFFPSSGILMFGKQGAGKDNVDYSNVMLTSEEEIKTTNPVATEQYGVVADNLQQQNTAPIVGAVNSQGALPGMVWQNRDVYLQGPIWAKIPHTDGNFHPSPLMGGFGLKHPPPQILIKSTPVPADPPTAFNQAKLNSFITQYSTGQVSVEIEWELQKENSKRWNPEIQYTSNYYKSTNVDFAVNTEGVYSEPRPIGTRYLTRNL

SEQ ID NO: 5064 - DNA, 2217 bp, Adeno-associated virus
atggctgctgacggttatcttccagattggctcgaggacaacctctctgagggcattcgcgagtggtgggacctgaaacctggagcccccaagcccaaggccaaccagcagaagcaggacgacggccggggtctggtgcttcctggctacaagtacctcggacccttcaacggactcgacaagggggagcccgtcaacgcggcggacgcagcggccctcgagcacgacaaggcctacgaccagcagctcaaagcgggtgacaatccgtacctgcggtataaccacgccgacgccgagtttcaggagcgtctgcaagaagatacgtcttttgggggcaacctcgggcgagcagtcttccaggccaagaagcgggttctcgaacctctcggtctggttgaggaagctgctaagacggctcctggaaagaagagaccggtagaaccgtcacctcagcgttcccccgactcctccacgggcatcggcaagaaaggccagcagcccgctagaaagagactgaactttgggcagactggcgactcagagtcagtccccgaccctcaaccaatcggagaaccaccagcaggcccctctggtctgggatctggtacaatggctgcaggcggtggcgcaccaatggctgacaataacgagggcgccgacggagtgggtaatgcctcaggaaattggcattgcgattccacatggctgggcgacagagtcatcaccaccagcacccgaacctgggctttgcccacctacaacaaccacctctacaagcaaatctccagtcagtcagcaggtagcaccaacgacaacgtctacttcggctacagcaccccctgggggtattttgacttcaacagattccactgtcacttctcaccacgtgactggcagcggctcatcaacaacaactggggattccggcccaagaagctcaacttcaagctgttcaacatccaggtcaaggaggtcacaacgaatgacggcgtcacgaccatcgccaataaccctaccagcacggttcaggtcttttcggactcggaataccagctgccctacgtcctcggctccgcacaccagggctgcctgcctccgttcccggcggacgtcttcatgattccccagtacggctacctgactctgaacaatggcagccaatcggtgggtcgttcctctttctactgcctggaatatttcccttctcaaatgctgagaacgggcaacaacttcaccttcagctacaccttcgaggacgttcccttccacagcagctacgcacacagccagagcctggaccggctgatgaatcctcttatcgaccagtacctgtattacctggccagaacacagagcaacgcaggaggcacagctggcaatcgggaactgcagttttatcagggcgggcctaccaccatggccgaacaagccaaaaactggctgcctggaccctgctacagacagcagcgcgtctccacgacactgtcgcaaaacaacaacagcaactttgcctggactggtgccaccaagtatcatctgaacggcagagactctctggtgaatccgggcgtcgccatggcaaccaacaaggacgacgaggaccgcttcttcccatccagcggcatcctcatgtttggcaagcagggagctggaaaagacaacgtggactatagcaacgtgatgctaaccagcgaggaagaaatcaagaccaccaaccccgtggccacagaacagtatggcgtggtggctgataacctacagcagcaaaacaccgctcctattgtgggggccgtcaacagccagggagccttacctggcatggtctggcagaaccgggacgtgtacctgcagggtcctatttgggccaagattcctcacacagatggcaactttcacccgtctcctttaatgggcggctttggacttaaacatccgcctcctcagatcctcatcaaaaacactcctgttcctgcggatcctccaacagcgttcaaccaggccaagctgaattctttcatcacgcagtacagcaccggacaagtcagcgtggagatcgagtgggagctgcagaaggagaacagcaagcgctggaacccagagattcagtatacttccaactactacaaatctacaaatgtggactttgctgttaatactgagggtgtttactctgagcctcgccccattggcactcgttacctcacccgtaatctgtaa

SEQ ID NO: 5065 - protein, 738 aa, Adeno-associated virus
MAADGYLPDWLEDNLSEGIREWWDLKPGAPKPKANQQKQDDGRGLVLPGYKYLGPFNGLDKGEPVNAADAAALEHDKAYDQQLKAGDNPYLRYNHADAEFQERLQEDTSFGGNLGRAVFQAKKRVLEPLGLVEEAAKTAPGKKRPVEPSPQRSPDSSTGIGKKGQQPARKRLNFGQTGDSESVPDPQPIGEPPAGPSGLGSGTMAAGGGAPMADNNEGADGVGNASGNWHCDSTWLGDRVITTSTRTWALPTYNNHLYKQISSQSAGSTNDNVYFGYSTPWGYFDFNRFHCHFSPRDWQRLINNNWGFRPKKLNFKLFNIQVKEVTTNDGVTTIANNPTSTVQVFSDSEYQLPYVLGSAHQGCLPPFPADVFMIPQYGYLTLNNGSQSVGRSSFYCLEYFPSQMLRTGNNFTFSYTFEDVPFHSSYAHSQSLDRLMNPLIDQYLYYLARTQSNAGGTAGNRELQFYQGGPTTMAEQAKNWLPGPCYRQQRVSTTLSQNNNSNFAWTGATKYHLNGRDSLVNPGVAMATNKDDEDRFFPSSGILMFGKQGAGKDNVDYSNVMLTSEEEIKTTNPVATEQYGVVADNLQQQNTAPIVGAVNSQGALPGMVWQNRDVYLQGPIWAKIPHTDGNFHPSPLMGGFGLKHPPPQILIKNTPVPADPPTAFNQAKLNSFITQYSTGQVSVEIEWELQKENSKRWNPEIQYTSNYYKSTNVDFAVNTEGVYSEPRPIGTRYLTRNL

SEQ ID NO: 5066 - DNA, 2208 bp, Adeno-associated virus
atggctgccgatggttatcttccagattggctcgaggacaacctctctgagggcattcacgagtggtgggacccgaaacctggagccccgaaacccaaagccaaccagcaaaagcaggacgacggccggggtctggtgcttcctggctacaagtacctcggacccttcaacggactcgacaagggggagcccgtcaacgcggcggacgcagcggccctcgagcacgacaaggcctacgaccagcagctcaaagcgggtgacaatccgtacctgcggtataatcacgccgacgccgagtttcaggagcgtctgcaagaagatacgtcttttgggggcaacctcgggcgagcagtcttccaggccaagaagcgggttctcgaacctctcggtctggttgaggaaggcgctaagacggctcctggaaagaagagaccggtagagccgtcaccacagcgttcccccgactcctccacgggcatcggcaagaaaggccagcagcccgccagaaagagactcaatttcggtcagactggcgactcagagtcagtccccgaccctcaacctatcggagaacctccagcagcgccctctagtgtgggatctggtacaatggctgcaggcggtggcgcaccaatggcagacaataacgaaggtgccgacggagtgggtagttcctcgggaaattggcattgcgattccacatggctgggcgacagagtcatcaccaccagcacccgaacctgggccctgcccacccacaacaaccacctctacaagcaaatctccaacgggacctcgggaggcagcaccaacgacaacgtctacttcggctacagcaccccctgggggtattttgacttcaacagattccactgtcacttctcaccacgtgaccggcagcgactcatcaacaacaactggggattccggcccaagagactcagcttcaagctcttcaacatccaggtcaaagaggtcacgcagaatgaaggcaccaagaccatcgccaataacctcaccagcaccatccaggtgtttacggactcggaataccagctgccgtacgtcctcggctctgcccaccagggctgcctgcctccgttcccggcggacgtcttcatgattcctcagtacggctacctgactctcaacaacggtagtcaggccgtgggacgttcctccttctactgcctggagtacttcccctctcagatgctgagaacgggcaacaacttttccttcagctacactttcgaggacgtgcctttccacagcagctacgcgcacagccagagtttggacaggctgatgaatcctctcatcgaccagtacctgtactacctgtcaagaacccagtctacggaaggcacagcgggaacccagcagttgctgttttctcaggccgggcctagcaacatgtcggctcaggccagaaactggctgcctggaccctgctacagacagcagcgcgtctccacgacactgtcgcaaaacaacaacagcaactttgcctggactggtgccaccaagtatcatctgaacggcagagactctctggtgaatccgggcgtcgccatggcaacccacaaggacgacgaggaacgcttcttcccttcgagcggagtcctgatttttggaaaaactggagcagctaataagactacactggaaaatgtgttaatgacaaatgaagaggaaattcgtcctaccaacccggtagccaccgaggaatacgggactgttagcagcaacctgcaggcggctaacactgcagcccagacacaagttgtcaacaaccagggagccttacctggtatggtctggcagaaccgggacgtgtacctgcagggtcccatctgggccaagattcctcacacggacggcaactttcacccgtctccgctgatgggcggctttggactgaagcatcctcagatcctgatcaaaaacactcctgttcctgctaatcccccggaggtgtttacgcctgccaagtttgcttctttcatcacacagtacagcaccggccaggtcagcgtggagatcgagtgggagctgcagaaggagaacagcaagcgctggaacccagagattcagtatacctccaattttgacaaacagactggtgtggactttgccgttgacagccagggtgtttattctgagcctcgccccattggtactcgttacctcacccgtaatctgtaa

SEQ ID NO: 5067 - protein, 735 aa, Adeno-associated virus
MAADGYLPDWLEDNLSEGIHEWWDPKPGAPKPKANQQKQDDGRGLVLPGYKYLGPFNGLDKGEPVNAADAAALEHDKAYDQQLKAGDNPYLRYNHADAEFQERLQEDTSFGGNLGRAVFQAKKRVLEPLGLVEEGAKTAPGKKRPVEPSPQRSPDSSTGIGKKGQQPARKRLNFGQTGDSESVPDPQPIGEPPAAPSSVGSGTMAAGGGAPMADNNEGADGVGSSSGNWHCDSTWLGDRVITTSTRTWALPTHNNHLYKQISNGTSGGSTNDNVYFGYSTPWGYFDFNRFHCHFSPRDRQRLINNNWGFRPKRLSFKLFNIQVKEVTQNEGTKTIANNLTSTIQVFTDSEYQLPYVLGSAHQGCLPPFPADVFMIPQYGYLTLNNGSQAVGRSSFYCLEYFPSQMLRTGNNFSFSYTFEDVPFHSSYAHSQSLDRLMNPLIDQYLYYLSRTQSTEGTAGTQQLLFSQAGPSNMSAQARNWLPGPCYRQQRVSTTLSQNNNSNFAWTGATKYHLNGRDSLVNPGVAMATHKDDEERFFPSSGVLIFGKTGAANKTTLENVLMTNEEEIRPTNPVATEEYGTVSSNLQAANTAAQTQVVNNQGALPGMVWQNRDVYLQGPIWAKIPHTDGNFHPSPLMGGFGLKHPQILIKNTPVPANPPEVFTPAKFASFITQYSTGQVSVEIEWELQKENSKRWNPEIQYTSNFDKQTGVDFAVDSQGVYSEPRPIGTRYLTRNL

SEQ ID NO: 5068 - protein, 738 aa, Adeno-associated virus
MAADGYLPDWLEDNLSEGIREWWDLKPGAPKPKANQQKQDDGRGLVLPGYKYLGPFNGLDKGEPVNAADAAALEHDKAYDQQLKAGDNPYLRYNHADAEFQERLQEDTSFGGNLGRAVFQAKKRVLEPLGLVEEGAKTAPGKKRPVEPSPQRSPDSSTGIGKKGQQPARKRLNFGQTGDSESVPDPQPIGEPPAAPSSVGSGTMAAGGGAPMADNNEGADGVGSSSGNWHCDSTWLGDRVITTSTRTWALPTYNNHLYKQISNGTSGGSTNDNTYFGYSTPWGYFDFNRFHCHFSPRDWQRPINNNWGFRPKRLSFKLFNIQVKEVTQNEGTKTIANNLTSTIQVFTDSEYQLPYVLGSAHQGCLPPFPADVFMIPQYGYLTLNNGSQAVGRSSFYCLEYFPSQMLRTGNNFSFSYPFEDVPFHSSYAHSQSLDRLMNPLIDQYLYYLSRTQSTGGTAGTQQLLFSQAGPSNMSAQARNWLPGPCYRQQRVSTTLSQNNNSNFAWTGATKYHLNGRDSLVNPGVAMATNKDDEDRFFPSSGILMFGKQGAGKDNVDYSNVMLTSEEEIKTTNPVATEQYGVVADNLQQQDTAPIVGAVNSQGALPGMVWQNRDVYLQGPIWAKIPHTDGNFHPSPLMGGFGLKHPPPQVLIKNTPVPADPPTAFNQAKLNSFITQYSTGQVSVEIEWELQKENSKRWNPEIQYTSNYYKSTNVDFAVNTEGVYSEPRPIGTRYLTRNL

SEQ ID NO: 5069 - DNA, 2217 bp, Adeno-associated virus
atggctgccgatggttatcttccagattggctcgaggacaacctctctgagggcattcgcgagtggtgggacctgaaacctggagccccgaaacccaaggccaaccagcaaaagcaggacgacggccggggtctggtgcttcctggctacaagtacctcggacccttcaacggactcgacaagggggagcccgtcaacgcggcggacgcagcggccctcgagcacgacaaggcctacgaccagcagctcaaagcgggtgacaatccgtacctgcggtataatcacgccgacgccgagtttcaggagcgtctgcaagaagatacgtcttttgggggcaacctcgggcgagcagtcttccaggccaagaagcgggttctcgaacctctcggtctggttgaggaaggcgctaagacggctcctggaaagaagagaccggtagagccgtcaccacagcgttcccccgactcctccacgggcatcggcaagaaaggccagcagcccgccagaaagagactcaatttcggtcagactggcgactcagagtcagtccccgaccctcaacctatcggagaacctccagcagcgccctctagtgtgggatctggtacaatggctgcaggcggtggcgcaccaatggcagacaataacgaaggtgccgacggagtgggtagttcctcgggaaattggcattgcgattccacatggctgggcgacagagtcatcaccaccagcacccgaacctgggccctgcccacctacaacaaccacctctacaagcaaatctccaacgggacctcgggaggcagcaccaacgacaacacctactttggctacagcaccccctgggggtattttgactttaacagattccactgccacttctcaccacgtgactggcagcgacccatcaacaacaactggggattccggcccaagagactcagcttcaagctcttcaacatccaggtcaaagaggtcacgcagaatgaaggcaccaagaccatcgccaataacctcaccagcaccatccaggtgtttacggactcggaataccagctgccgtacgtcctcggctctgcccaccagggctgcctgcctccgttcccggcggacgtcttcatgattcctcagtacggctacctgactctcaacaacggtagtcaggccgtgggacgttcctccttctactgcctggagtacttcccctctcagatgctgagaacgggcaacaacttttccttcagctaccctttcgaggacgtgcctttccacagcagctacgcgcacagccagagtttggacaggctgatgaatcctctcatcgaccagtacctgtactacctgtcaagaacccagtctacgggaggcacagcgggaacccagcagttgctgttttctcaggccgggcctagcaacatgtcggctcaggccagaaactggctgcctggaccctgctacagacagcagcgcgtctccacgacactgtcgcaaaacaacaacagcaactttgcctggactggtgccaccaagtatcatctgaacggcagagactctctggtgaatccgggcgtcgccatggcaaccaacaaggacgacgaggaccgcttcttcccatccagcggcatcctcatgtttggcaagcagggagctggaaaagacaacgtggactatagcaacgtgatgctaaccagcgaggaagaaatcaagaccaccaaccccgtggccacagaacagtatggcgtggtggctgataacctacagcagcaagacaccgctcctattgtgggggccgtcaacagccagggagccttacctggcatggtctggcagaaccgggacgtgtacctgcagggtcctatttgggccaagattcctcacacagatggcaactttcacccgtctcctttaatgggcggctttggacttaaacatccgcctcctcaggtcctcatcaaaaacactcctgttcctgcggatcctccaacagcgttcaaccaggccaagctgaattctttcatcacgcagtacagcaccggacaagtcagcgtggagatcgagtgggagctgcagaaggagaacagcaagcgctggaacccagagattcagtatacttccaactactacaaatctacaaatgtggactttgctgttaatactgagggtgtttactctgagcctcgccccattggcactcgttacctcacccgtaatctgtaa

SEQ ID NO: 5070 - DNA, 2214 bp, Adeno-associated virus
atggctgctgacggttatcttccagattggctcgaggacaacctctctgagggcattcgcgagtggtgggacctgaaacctggagcccccaagcccaaggccaaccagcagaagcaggacgacggccggggtctggtgcttcctggctacaagtacctcggacccttcaacggactcgacaagggggagcccgtcaacgcggcggacgcagcggccctcgagcacgacaaggcctacgaccagcagctcaaagcgggtgacaatccgtacctgcggtataaccacgccgacgccgagttccaggagcgtctgcaagaagatacgtcttttgggggcaacctcgggcgagcagtcttccaggccaagaagcgggttctcgaacctctcggtctggctgaggaagctgctaagacggctcctggaaagaagagaccggtagaaccgtcacctcagcgttcccccgactcctccacgggcatcggcaagaaaggccagcagcccgctagaaagagactgaactttgggcagactggcgactcagagtcagtccccgaccctcaaccaatcggagagccaccagcaggcccctctggtctgggatctggtacaatggctgcaggcggtggcgcaccaatggctgacaataacaagggcgccgacggagtgggtaatgcctcaggaaattggcattgcgattccacatggctgggcgacagagtcatcaccaccagcacccgaacctgggctttgcccacctacaacaaccacctctacaagcaaatctccagtcagtcagcaggtagcaccaacgacaacgtctacttcggctacagcaccccctgggggtattttgacttcaacagattccactgtcacttctcaccacgtgactggcagcggctcatcaacaacaactggggattccggcccaagaagctcaacttcaagctgttcaacatccaggtcaaggaggtcacaacgggtgacggcgtcacgaccatcgccaataaccttaccagcacggttcaggtcttttcggactcggaataccagctgccctacgtcctcggctccgcacaccagggctgcctgcctccgttcccggcggacgtcttcatgattccccagtacggctacctgactctgaacaatgacagccaatcggtgggtcgttcctctttctactgcctggaatatttcccttctcaaatgctgagaacgggcaacaacttcaccttcagctacaccttcgaggacgttcccttccacagcagctacgcacacagccagagcctggaccggctgatgaatcctcttatcgaccagtacctgtattacctggccagaacacagagcaacgcaggaggcacagctggcaatcgggaactgcagttttatcagggcgggcctaccaccatggccgaacaagccaaaaactggctgcctggaccttgcttccggcaacaaagagtctccaagacgctggatcaaaacaacaacagcaactttgcttggactggtgccaccaaataccatctaaatggaagaaattcattggttaatcccggtgtcgccatggcaacccacaaggacgacgaggaacgcttcttcccttcgagcggagtcctgatttttggaaaaactggagcagctaataagactacactggaaaatgtgttaatgacaaatgaagaggaaattcgtcctaccaacccggtagccaccgaggaatacgggactgttagcagcaacctgcaggcggctaacactgcagcccagacacaagttgtcaacaaccagggagccttacctggtatggtctggcagaaccgggacgtgtacctgcagggtcccatctgggccaagattcctcacacggacggcaactttcacccgtctccgctgatgggcggctttggactgaagcatccgcctcctcagatcctgatcaaaaacactcctgttcctgctaatcccccggaggtgtttacgcctgccaagtttgcttctttcatcacacagtacagcaccggccaggtcagcgtggagatcgagtgggagctgcagaaggagaacagcaagcgctggaacccagagattcagtatacctccaattttgacaaacagactggtgtggactttgccgttgacagccagggtgtttattctgagcctcgccccattggtactcgttacctcacccgtaatctgtaa

SEQ ID NO: 5071 - protein, 737 aa, Adeno-associated virus
MAADGYLPDWLEDNLSEGIREWWDLKPGAPKPKANQQKQDDGRGLVLPGYKYLGPFNGLDKGEPVNAADAAALEHDKAYDQQLKAGDNPYLRYNHADAEFQERLQEDTSFGGNLGRAVFQAKKRVLEPLGLAEEAAKTAPGKKRPVEPSPQRSPDSSTGIGKKGQQPARKRLNFGQTGDSESVPDPQPIGEPPAGPSGLGSGTMAAGGGAPMADNNKGADGVGNASGNWHCDSTWLGDRVITTSTRTWALPTYNNHLYKQISSQSAGSTNDNVYFGYSTPWGYFDFNRFHCHFSPRDWQRLINNNWGFRPKKLNFKLFNIQVKEVTTGDGVTTIANNLTSTVQVFSDSEYQLPYVLGSAHQGCLPPFPADVFMIPQYGYLTLNNDSQSVGRSSFYCLEYFPSQMLRTGNNFTFSYTFEDVPFHSSYAHSQSLDRLMNPLIDQYLYYLARTQSNAGGTAGNRELQFYQGGPTTMAEQAKNWLPGPCFRQQRVSKTLDQNNNSNFAWTGATKYHLNGRNSLVNPGVAMATHKDDEERFFPSSGVLIFGKTGAANKTTLENVLMTNEEEIRPTNPVATEEYGTVSSNLQAANTAAQTQVVNNQGALPGMVWQNRDVYLQGPIWAKIPHTDGNFHPSPLMGGFGLKHPPPQILIKNTPVPANPPEVFTPAKFASFITQYSTGQVSVEIEWELQKENSKRWNPEIQYTSNFDKQTGVDFAVDSQGVYSEPRPIGTRYLTRNL

SEQ ID NO: 5072 - DNA, 2217 bp, Adeno-associated virus
atggctgccgatggttatcttccagattggctcgaggacaacctctctgagggcattcgcgagtggtgggacctgaaacctggagccccgaaacccaaagccaaccagcaaaagcaggacgacggccggggtctggtgcttcctggctacaagtacctcggacccttcaacggactcgacaagggggagcccgtcaacgcggcggacgcagcggccctcgagcacgacaaggcctacgaccagcagctcaaagcgggtgacaatccgtacctgcggtataatcacgccgacgccgagtttcaggagcgtctgcaagaagatacgtcttttgggggcaacctcgggcgagcagtcttccaggccaagaagcgggttctcgaacctctcggtctggttgaggaaggcgctaagacggctcctggaaagaagagaccggtagagccgtcaccacagcgttcccccgactcctccacgggcatcggcaagaaaggccagcagcccgccagaaagagactcaatttcggtcagactggcgactcagagtcagtccccgaccctcaacctatcggagaacctccagcagcgccctctagtgtgggatctggtacaatggctgcaggcggtggcgcaccaatggcagacaataacgaaggtgccgacggagtgggtagttcctcgggaaattggcattgcgattccacatggctgggcgacagagtcatcaccaccagcacccgaacctgggccctgcccacctacaacaaccacctctacaagcaaatctccaacgggacctcgggaggcagcaccaacgacaacacctactttggctacagcaccccctgggggtattttgactttaacagattccactgccacttctcaccacgtgactggcagcgactcatcaacaacaactggggattccggcccaagagactcagcttcaagctcttcaacatccaggtcaaagaggtcacgcagaatgaaggcaccaagaccatcgccaataacctcaccagcaccatccaggtgtttacggactcggaataccagctgccgtacgtcctcggctctgcccaccagggctgcctgcctccgttcccggcggacgtcttcatgattcctcagtacggctacctgactctcaacaacggtagtcaggccgtgggacgttcctccttctactgcctggagtacttcccctctcagatgctgagaacgggcaacaacttttccttcagctacactttcgaggacgtgcctttccacagcagctacgcgcacagccagagtttggacaggctgatgaatcctctcatcgaccagtacctgtactacctgtcaagaacccagtctacgggaggcacagcgggaacccagcagttgctgttttctcaggccgggcctagcaacatgtcggctcaggccagaaactggctgcctggaccctgctacagacagcagcgcgtctccacgacactgtcgcaaaacaacaacagcaactttgcctggactggtgccaccaagtatcatctgaacggcagagactctctggtgaatccgggcgtcgccatggcaaccaacaaggacgacgaggaccgcttcttcccatccagcggcatcctcatgtttggcaagcagggagctggaaaagacaacgtggactatagcaacgtgatgctaaccagcgaggaagaaatcaagaccaccaaccccgtggccacagaacagtatggcgtggtggctgataacctacagcagcaaaacaccgctcctattgtgggggccgtcaacagccagggagccttacctggcatggtctggcagaaccgggacgtgtacctgcagggtcctatttgggccaagattcctcacacagatggcaactttcacccgtctcctttaatgggcggctttggacttaaacatccgcctcctcagatcctcatcaaaaacactcctgttcctgcggatcctccaacagcgttcaaccaggccaagctgaattctttcatcacgcagtacagcaccggacaagtcagcgtggagatcgtgtgggagctgcagaaggagaacagcaagcgcaggaacccagagattcagtatacttccaactactacaaatctacaaatgtggactttgctgttaatactgagggtgtttactctgagcctcgccccattggcactcgttacctcacccgtaatctgtaa

SEQ ID NO: 5073 - protein, 738 aa, Adeno-associated virus
MAADGYLPDWLEDNLSEGIREWWDLKPGAPKPKANQQKQDDGRGLVLPGYKYLGPFNGLDKGEPVNAADAAALEHDKAYDQQLKAGDNPYLRYNHADAEFQERLQEDTSFGGNLGRAVFQAKKRVLEPLGLVEEGAKTAPGKKRPVEPSPQRSPDSSTGIGKKGQQPARKRLNFGQTGDSESVPDPQPIGEPPAAPSSVGSGTMAAGGGAPMADNNEGADGVGSSSGNWHCDSTWLGDRVITTSTRTWALPTYNNHLYKQISNGTSGGSTNDNTYFGYSTPWGYFDFNRFHCHFSPRDWQRLINNNWGFRPKRLSFKLFNIQVKEVTQNEGTKTIANNLTSTIQVFTDSEYQLPYVLGSAHQGCLPPFPADVFMIPQYGYLTLNNGSQAVGRSSFYCLEYFPSQMLRTGNNFSFSYTFEDVPFHSSYAHSQSLDRLMNPLIDQYLYYLSRTQSTGGTAGTQQLLFSQAGPSNMSAQARNWLPGPCYRQQRVSTTLSQNNNSNFAWTGATKYHLNGRDSLVNPGVAMATNKDDEDRFFPSSGILMFGKQGAGKDNVDYSNVMLTSEEEIKTTNPVATEQYGVVADNLQQQNTAPIVGAVNSQGALPGMVWQNRDVYLQGPIWAKIPHTDGNFHPSPLMGGFGLKHPPPQILIKNTPVPADPPTAFNQAKLNSFITQYSTGQVSVEIVWELQKENSKRRNPEIQYTSNYYKSTNVDFAVNTEGVYSEPRPIGTRYLTRNL

SEQ ID NO: 5074 - protein, 738 aa, Adeno-associated virus
MAADGYLPDWLEDNLSEGIREWWDLKPGAPKPKANQQKQDDGRGLVLPGYKYLGPFNGLDKGEPVNAADAAALEHDKAYDQQLKAGDNPYLRYNHADAEFQERLQEDTSFGGNLGRAVFQAKKRVLEPLGLVEEGAKTAPGKKRPVEPSPQRSPDSSTGIGKKGQQPARKRLNFGQTGDSESVPDPQPIGEPPAAPSSVGSGTMAAGGGAPMADNNEGADGVGSSSGNWHCDSTWLGDRVITTSTRTWALPTYNNHLYKQISNGTSGGSTNDNTYFGYSTPWGYFDFNRFHCHFSPRDWQRLINNNWGFRPKRLSFKLFNIQVKEVTQNEGTKTIANNLTSTIQVFTDSEYQLPYVLGSAHQGCLPPFPADVFMIPQYGYLTLNNGSQAVGRSSFYCLEYFPSQMLRTGNNFSFSYTFEDVPFHSSYAHSQSLDRLMNPLIDQYLYYLSRTQSTGGTAGTQQLLFSQAGPSNMSAQARNWLPGPCYRQQRVSTTLSQNNNSNFAWTGATKYHLNGRDSLVNPGVAMATNKDDEDRFFPSSGILMFGKQGAGKDNVDYSNVMLTSEEEIKTTNPVATEQYGVVADNLQQQNTAPIVGAVNSQGALPGMVWQNRDVYLQGPIWAKIPHTDGNFHPSPLMGGFGLKHPPPQILIKNTPVPADPPTAFNQAKLNSFITQYSTGQVSVEIEWELQKENSKRWNPEIQYTSNYYKSTNVDFAVNTEGVYSEPRPIGTRYLTRNL

SEQ ID NO: 5075 - protein, 738 aa, Adeno-associated virus
MAADGYLPDWLEDNLSEGIREWWDLKPGAPKPKANQQKQDDGRGLVLPGYKYLGPFNGLDKGEPVNAADAAALEHDKAYDQQLKAGDNPYLRYNHADAEFQERLQEDTSFGGNLGRAVFQAKKRVLEPLGLVEEGAKTAPGKKRPVEPSPQRSPDSSTGIGKKGQQPARKRLNFGQTGDSESVPDPQPIGEPPAAPSSVGSGTMAAGGGAPMADNNEGADGVGSSSGNWHCDSTWLGDRVITTSTRTWALPTYNNHLYKQISNGTSGGSTNDNTYFGYSTPWGYFDFNRFHCHFSPRDWQRLINNNWGFRPKRLSFKLFNIQVKEVTQNEGTKTIANNLTSTIQVFTDSEYQLPYVLGSAHQGCLPPFPADVFMIPQYGYLTLNNGSQAVGRSSFYCLEYFPSQMLRTGNNFSFSYTFEDVPFHSSYAHSQSLDRLMNPLIDQYLYYLSRTQSTGGTAGTQQLLFSQAGPSNMSAQARNWLPGPCYRQQRVSTTLSQNNNSNFAWTGATKYHLNGRDSLVNPGVAMATNKDDEDRFFPSSGILMFGKQGAGKDNVDYSNVMLTSEEEIKTTNPVATEQYGVVADNLQQQNTAPIVGAVNSQGALPGMVWQNRDVYLQGPIWAKIPHTDGNFHPSPLMGGFGLKHPPPQILIKNTPVPADPPTAFNQAKLNSFITQYSTGQVSVEIVWELQKENSKRWNPEIQYTSNYYKSTNVDFAVNTEGVYSEPRPIGTRYLTRNL

SEQ ID NO: 5076 - protein, 738 aa, Adeno-associated virus; identical to SEQ ID NO: 5074

SEQ ID NO: 5077 - DNA, 2214 bp, Adeno-associated virus
atggctgctgacggttatcttccagattggctcgaggacaacctctctgagggcattcgcgagtggtgggacctgaaacctggagcccccaagcccaaggccaaccagcagaagcaggacgacggccggggtctggtgcttcctggctacaagtacctcggacccttcaacggactcgacaagggggagcccgtcaacgcggcggacgcagcggccctcgagcacgacaaggcctacgaccagcagctcaaagcgggtgacaatccgtacctgcggtataaccacgccgacgccgagtttcaggagcgtctgcaagaagatacgtcttttgggggcaacctcgggcgagcagtcttccaggccaagaagcgggttctcgaacctctcggtctggttgaggaagctgctaagacggctcctggaaagaagagaccggtagaaccgtcacctcagcgttcccccgactcctccacgggcatcggcaagaaaggccagcagcccgctagaaagagactgaactttgggcagactggcgactcagagtcagtccccgaccctcaaccaatcggagaaccaccagcaggcccctctggtctgggatctggtacaatggctgcaggcggtggcgctccaatggcagacaataacgaaggcgccgacggagtgggtaatgcctcaggaaattggcattgcgattccacatggctgggcgacagagtcatcaccaccagcacccgaacctgggctttgcccacctacaacaaccacctctacaagcaaatctccagtcagtcagcaggtagcaccaacgacaacgtctacttcggctacagcaccccctgggggtattttgacttcaacagattccactgtcacttctcaccacgtgactggcagcggctcatcaacaacaactggggattccggcccaagaagctcaacttcaagctgttcaacatccaggtcaaggaggtcacaacgaatgacggcgtcacgaccatcgccaataaccttaccagcacggttcaggtcttttcggactcggaataccagctgccctacgtcctcggctccgcacaccagggctgcctgcctccgttcccggcggacgtcttcatgattccccagtacggctacctgactctgaacaatggcagccaatcggtgggtcgttcctctttctactgcctggaatatttcccttctcaaatgctgagaacgggcaacaacttcaccttcagctacaccttcgaggacgttcccttccacagcagctacgcacacagccagagcctggaccggctgatgaatcctcttatcgaccagtacctgtattacctggccagaacacagagcaacgcaggaggcacagctggcaatcgggaactgcagttttatcagggcgggcctaccaccatggccgaacaagccaaaaactggctgcctagaccttgcttccggcaacaaagagtctccaagacgctggatcaaaacaacaacagcaactttgcttggactggtgccaccaaataccatctaaatggaagaaattcattggttaatcccggtgtcgccatggcaacccacaaggacgacgaggaacgcttcttcccttcgagcggagtcctgatttttggaaaaactggagcagctaataagactacactggaaaatgtgttaatgacaaatgaagaggaaattcgtcctaccaacccggtagccaccgaggaatacgggactgttagcagcaacctgcaggcggctaacactgcagcccagacacaagttgtcaacaaccagggagccttacctggtatggtctggcagaaccgggacgtgtacctgcagggtcccatctgggccaagattcctcacacggacggcaactttcacccgtctccgctgatgggcggctttggactgaagcatccgcctcctcagatcctgatcaaaaacactcctgttcctgctaatcccccggaggtgtttacgcctgccaagtttgcttctttcatcacacagtacagcaccggccaggtcagcgtggagatcgagtgggagctgcagaaggagaacagcaagcgctggaacccagagattcagtatacctccaattttgacaaacagactggtgtggactttgccgttgacagccagggtgtttattctgagcctcgccccattggtactcgttacctcacccgtaatctgtaa

SEQ ID NO: 5078 - protein, 737 aa, Adeno-associated virus
MAADGYLPDWLEDNLSEGIREWWDLKPGAPKPKANQQKQDDGRGLVLPGYKYLGPFNGLDKGEPVNAADAAALEHDKAYDQQLKAGDNPYLRYNHADAEFQERLQEDTSFGGNLGRAVFQAKKRVLEPLGLVEEAAKTAPGKKRPVEPSPQRSPDSSTGIGKKGQQPARKRLNFGQTGDSESVPDPQPIGEPPAGPSGLGSGTMAAGGGAPMADNNEGADGVGNASGNWHCDSTWLGDRVITTSTRTWALPTYNNHLYKQISSQSAGSTNDNVYFGYSTPWGYFDFNRFHCHFSPRDWQRLINNNWGFRPKKLNFKLFNIQVKEVTTNDGVTTIANNLTSTVQVFSDSEYQLPYVLGSAHQGCLPPFPADVFMIPQYGYLTLNNGSQSVGRSSFYCLEYFPSQMLRTGNNFTFSYTFEDVPFHSSYAHSQSLDRLMNPLIDQYLYYLARTQSNAGGTAGNRELQFYQGGPTTMAEQAKNWLPRPCFRQQRVSKTLDQNNNSNFAWTGATKYHLNGRNSLVNPGVAMATHKDDEERFFPSSGVLIFGKTGAANKTTLENVLMTNEEEIRPTNPVATEEYGTVSSNLQAANTAAQTQVVNNQGALPGMVWQNRDVYLQGPIWAKIPHTDGNFHPSPLMGGFGLKHPPPQILIKNTPVPANPPEVFTPAKFASFITQYSTGQVSVEIEWELQKENSKRWNPEIQYTSNFDKQTGVDFAVDSQGVYSEPRPIGTRYLTRNL

SEQ ID NO: 5079 - DNA, 2214 bp, Adeno-associated virus
atggctgctgacggttatcttccagattggctcgaggacaacctctctgagggcattcgcgagtggtgggacctgaaacctggagcccccaagcccaaggccaaccagcagaagcaggacgacggccggggtctggtgcttcctggctacaagtacctcggacccttcaacggactcgacaagggggagcccgtcaacgcggcggacgcagcggccctcgagcacgacaaggcctacgaccagcagctcaaagcgggtgacaatccgtacctgcggtataaccatgccgacgccgagtttcaggagcgtctgcaagaagatacgtcttttgggggcaacctcgggcgagcagtcctccaggccaagaagcgggttctcgaacctctcggtctggttgaggaagctgctaagacggctcctggaaagaagagaccggtagaaccgtcacctcagcgttcccccgactcctccacgggcatcggcaagaaaggccagcagcccgctagaaagagactgaactttgggcagactggcgactcagagtcagtccccgaccctcaaccaatcggagaaccaccagcaggcccctctggtctgggatctggtacaatggctgcaggcggtggcgctccaatggcagacaataacgaaggcgccgacggagtgggtaatgcctcaggaaattggcattgcgattccacatggctgggcgacagagtcatcaccaccagcacccgaacctgggctttgcccacctacaacaaccacctctacaagcaaatctccagtcagtcagcaggtagcaccaacgacaacgtctacttcggctacagcaccccctgggggtattttgacttcaacagattccactgtcacttctcaccacgtgactggcagcggctcatcaacaacaactggggattccggcccaagaagctcaacttcaagctgttcaacatccaggtcaaggaggtcacaacgaatgacggcgtcacgaccatcgccaataaccttaccagcacggttcaggtcttttcggactcggaataccagctgccctacgtcctcggctccgcacaccagggctgcctgcctccgttcccggcggacgtcttcatgattccccagtacggctacctgactctgaacaatggcagccaatcggtgggtcgttcctctttctactgcctggaatatttcccttctcaaatgctgagaacgggcaacaacttcaccttcagctacaccttcgaggacgttcccttccacagcagctacgcacacagccagagcctggaccggctgatgaatcctcttatcgaccagtacctgtattacctggccagaacacagagcaacgcaggaggcacagctggcaatcgggaactgcagttttatcagggcgggcctaccaccatggccgaacaagccaaaaactggctgcctggaccttgcttccggcaacaaagagtctccaagacgctggatcaaaacaacaacagcaactttgcttggactggtgccaccaaataccatctaaatggaagaaattcattggttaatcccggtgtcgccatggcaacccacaaggacgacgaggaacgcttcttcccttcgagcggagtcctgatttttggaaaaactggagcagctaataagactacactggaaaatgtgttaatgacaaatgaagaggaaattcgtcctaccaacccggtagccaccgaggaatacgggactgttagcagcaacctgcaggcggctaacactgcagcccagacacaagttgtcaacaaccagggagccttacctggtatggtctggcagaaccgggacgtgtacctgcagggtcccatctgggccaagattcctcacacggacggcaactttcacccgtctccgctgatgggcggctttggactgaagcatccgcctcctcagatcctgatcaaaaacactcctgttcctgctaatcccccggaggtgtttacgcctgccaagtttgcttctttcatcacacagtacagcaccggccaggtcagcgtggagatcgagtgggagctgcagaaggagaacagcaagcgctggaacccagagattcagtatacctccaattttgacaaacagactggtgtggactttgccgttgacagccagggtgtttattctgagcctcgccccattggtactcgttacctcacccgtaatctgtaa

SEQ ID NO: 5080 - protein, 737 aa, Adeno-associated virus; identical to SEQ ID NO: 5040

SEQ ID NO: 5081 - protein, 737 aa, Adeno-associated virus
MAADGYLPDWLEDNLSEGIREWWDLKPGAPKPKANQQKQDDGRGLVLPGYKYLGPFNGLDKGEPVNAADAAALEHDKAYDQQLKAGDNPYLRYNHADAEFQERLQEDTSFGGNLGRAVLQAKKRVLEPLGLVEEAAKTAPGKKRPVEPSPQRSPDSSTGIGKKGQQPARKRLNFGQTGDSESVPDPQPIGEPPAGPSGLGSGTMAAGGGAPMADNNEGADGVGNASGNWHCDSTWLGDRVITTSTRTWALPTYNNHLYKQISSQSAGSTNDNVYFGYSTPWGYFDFNRFHCHFSPRDWQRLINNNWGFRPKKLNFKLFNIQVKEVTTNDGVTTIANNLTSTVQVFSDSEYQLPYVLGSAHQGCLPPFPADVFMIPQYGYLTLNNGSQSVGRSSFYCLEYFPSQMLRTGNNFTFSYTFEDVPFHSSYAHSQSLDRLMNPLIDQYLYYLARTQSNAGGTAGNRELQFYQGGPTTMAEQAKNWLPGPCFRQQRVSKTLDQNNNSNFAWTGATKYHLNGRNSLVNPGVAMATHKDDEERFFPSSGVLIFGKTGAANKTTLENVLMTNEEEIRPTNPVATEEYGTVSSNLQAANTAAQTQVVNNQGALPGMVWQNRDVYLQGPIWAKIPHTDGNFHPSPLMGGFGLKHPPPQILIKNTPVPANPPEVFTPAKFASFITQYSTGQVSVEIEWELQKENSKRWNPEIQYTSNFDKQTGVDFAVDSQGVYSEPRPIGTRYLTRNL

SEQ ID NO: 5082 - DNA, 2217 bp, Adeno-associated virus
atggctgccgatggttatcttccagattggctcgaggacaacctctctgagggcattcgcgagtggtgggacctgaaacctggagccccgaaacccaaagccaaccagcaaaagcaggacgacggccggggtctggtgcttcctggctacaagtacctcggacccttcaacggactcgacaagggggagcccgtcaacgcggcggacgcagcggccctcgagcacgacaaggcctacgaccagcagctcaaagcgggtgacaatccgtacctgcggtataatcacgccgacgccgagtttcaggagcgtctgcaagaagatacgtcttttgggggcaacctcgggcgagcagtcttccaggccaagaagcgggttctcgaacctctcggtctggttgaggaaggcgctaagacggctcctggaaagaagagaccggtagagccgtcaccacagcgttcccccgactcctccacgggcatcggcaagaaaggccagcagcccgccagaaagagactcaatttcggtcagactggcgactcagagtcagtccccgaccctcaacctatcggagaacctccagcagcgccctctagtgtgggatctggtacaatggctgcaggcggtggcgcaccaatggcagacaataacgaaggtgccgacggagtgggtagttcctcgggaaattggcattgcgattccacatggctgggcgacagagtcatcaccaccagcacccgaacctgggccctgcccacctacaacaaccacctctacaagcaaatctccaacgggacctcgggaggcagcaccaacgacaacacctactttggctacagcaccccctgggggtattttgactttaacagattccactgccacttctcaccacgtgactggcagcgactcatcaacaacaactggggattccggcccaagagactcagcttcaagctcttcaacatccaggtcaaagaggtcacgcagaatgaaggcaccaagaccatcgccaataacctcaccagcaccatccaggtgtttacggactcggaataccagctgccgtacgtcctcggctctgcccaccagggctgcctgcctccgttcccggcggacgtcttcatgattcctcagtacggctacctgactctcaacaacggtagtcaggccgtgggacgttcctccttctactgcctggagtacttcccctctcagatgctgagaacgggcaacaacttttccttcagctacactttcgaggacgtgcctttccacagcagctacgcgcacagccagagtttggacaggctgatgaatcctctcatcgaccagtacctgtactacctgtcaagaacccagtctacgggaggcacagcgggaacccagcagttgctgttttctcaggccgggcctagcaacatgtcggctcaggccagaaactggctgcctggaccctgctacagacagcagcgcgtctccacgacactgtcgcaaaacaacaacagcaactttgcctggactggtgccaccaagtatcatctgaacggcagagactctctggtgaatccgggcgtcgccatggcaaccaacaaggacgacgaggaccgcttcttcccacccagcggcatcctcatgtttggcaagcagggagctggaaaagacaacgtggactatagcaacgtgatgctaaccagcgaggaagaaatcaagaccaccaaccccgtggccacagaacagtatggcgtggtggctgataacctacagcagcaaaacaccgctcctattgtgggggccgtcaacagccagggagccttacctggcatggtctggcagaaccgggacgtgtacctgcagggtcctatttgggccaagattcctcacacagatggcaactttcacccgtctcctttaatgggcggctttggacttaaacatccgcctcctcagatcctcatcaaaaacactcctgttcctgcggatcctccaacagcgttcaaccaggccaagctgaattctttcatcacgcagtacagcaccggacaagtcagcgtggtgatcgagtgggagctgcagaaggagaacagcaagcgctggaacccagagattcagtatacttccaactactacaaatctacaaatgtggactttgctgttaatactgagggtgtttactctgagcttcgccccattggcactcgttacctcacccgtaatctgtaa

SEQ ID NO: 5083 - protein, 738 aa, Adeno-associated virus
MAADGYLPDWLEDNLSEGIREWWDLKPGAPKPKANQQKQDDGRGLVLPGYKYLGPFNGLDKGEPVNAADAAALEHDKAYDQQLKAGDNPYLRYNHADAEFQERLQEDTSFGGNLGRAVFQAKKRVLEPLGLVEEGAKTAPGKKRPVEPSPQRSPDSSTGIGKKGQQPARKRLNFGQTGDSESVPDPQPIGEPPAAPSSVGSGTMAAGGGAPMADNNEGADGVGSSSGNWHCDSTWLGDRVITTSTRTWALPTYNNHLYKQISNGTSGGSTNDNTYFGYSTPWGYFDFNRFHCHFSPRDWQRLINNNWGFRPKRLSFKLFNIQVKEVTQNEGTKTIANNLTSTIQVFTDSEYQLPYVLGSAHQGCLPPFPADVFMIPQYGYLTLNNGSQAVGRSSFYCLEYFPSQMLRTGNNFSFSYTFEDVPFHSSYAHSQSLDRLMNPLIDQYLYYLSRTQSTGGTAGTQQLLFSQAGPSNMSAQARNWLPGPCYRQQRVSTTLSQNNNSNFAWTGATKYHLNGRDSLVNPGVAMATNKDDEDRFFPPSGILMFGKQGAGKDNVDYSNVMLTSEEEIKTTNPVATEQYGVVADNLQQQNTAPIVGAVNSQGALPGMVWQNRDVYLQGPIWAKIPHTDGNFHPSPLMGGFGLKHPPPQILIKNTPVPADPPTAFNQAKLNSFITQYSTGQVSVVIEWELQKENSKRWNPEIQYTSNYYKSTNVDFAVNTEGVYSELRPIGTRYLTRNL

SEQ ID NO: 5084 - DNA, 2214 bp, Adeno-associated virus
atggctgctgacggttatcttccagattggctcgaggacaacctctctgagggcattcgcgagtggtgggacctgaaacctggagcccccaagcccaaggccaaccagcagaagcaggacgacggccggggtctggtgcttcctggctacaagtacctcggacccttcaacggactcgacaagggggagcccgtcaacgcggcggacgcagcggccctcgagcacgacaaggcctacgaccagcagctcaaagcgggtgacaatccgtacctgcggtataaccacgccgacgccgagtttcaggagcgtctgcaagaagatacgtcttttgggggcaacctcgggcgagcagtcttccaggccaagaagcgggttctcgaacctctcggtctggttgaggaagctgctaagacggctcctggaaagaagagaccggtagaaccgtcacctcagcgttcccccgactcctccacgggcatcggcaagaaaggccagcagcccgctagaaagagactgaactttgggcagactggcgactcagagtcagtccccgaccctcaaccaatcggagaaccaccagcaggcccctctggtctgggatctggtacaatggctgcaggcggtggcgccccaatggcagacaataacgaaggcgccgacggagtgggtaatgcctcaggaaattggcattgcgattccacatggctgggcgacagagtcatcaccaccagcacccgaacctgggctttgcccacctacaacaaccacctctacaagcaaatctccagtcagtcagcaggtagcaccaacgacaacgtctacttcggctacagcaccccctgggggtattttgacttcaacagattccactgtcacttctcaccacgtgactggcagcggctcatcaacaacaactggggattccggcccaagaagctcaacttcaagctgttcaacatccaggtcaaggaggtcacaacgaatgacggcgtcacgaccatcgccaataaccttaccagcacggttcaggtcttttcggactcggaataccagctgccctacgtcctcggctccgcacaccagggctgcctgcctccgttcccggcggacgtcttcatgattccccagtacggctacctgactctgaacaatggcagccaatcggtgggtcgttcctctttctactgcctggaatatttcccttctcaaatgctgagaacgggcaacaacttcaccatcagctacaccttcgaggacgttcccttccacagcagctacgcacacagccagagcctggaccggctgatgaatcctcttatcgaccagtacctgtattacctggccagaacacagagcaacgcaggaggcacagctggcaatcaggaactgcagttttatcagggcgggcctaccaccatggccgaacaagccaaaaactggctgcctggaccttgcttccggcaacaaagagtctccaagacgctggatcaaaacaacaacagcaactttgcttggactggtgccaccaaataccatctaaatggaagaaattcattggttaatcccggtgtcgccatggcaacccacaaggacgacgaggaacgcttcttcccttcgagcggagtcctgatttttggaaaaactggagcagctaataagactacactggaaaatgtgttaatgacaaatgaagaggaaattcgtcctaccaacccggtagccaccgaggaatacgggactgttagcagcaacctgcaggcggctaacactgcagcccagacacaagttgtcaacaaccagggagccttacctggtatggtctggcagaaccgggacgtgtacctgcagggtcccatctgggccaagattcctcacacagatggcaactttcacccgtctcctttaatgggcggctttggacttaaacatccgcctcctcagatcctcatcaaaaacactcctgttcctgcggatcctccaacagcgttcaaccaggccaagctgaattctttcatcacgcagtacagcaccggacaagtcagcgtggagatcgagtgggagctgcagaaggagaacagcaagcgctggaacccagagattcagtatacttccaactactacaaatctacaaatgtggactttgctgttaatactgagggtgtttactctgagcctcgccccattggcactcgttacctcacccgtaatctgtaa

SEQ ID NO: 5085 - protein, 737 aa, Adeno-associated virus
MAADGYLPDWLEDNLSEGIREWWDLKPGAPKPKANQQKQDDGRGLVLPGYKYLGPFNGLDKGEPVNAADAAALEHDKAYDQQLKAGDNPYLRYNHADAEFQERLQEDTSFGGNLGRAVFQAKKRVLEPLGLVEEAAKTAPGKKRPVEPSPQRSPDSSTGIGKKGQQPARKRLNFGQTGDSESVPDPQPIGEPPAGPSGLGSGTMAAGGGAPMADNNEGADGVGNASGNWHCDSTWLGDRVITTSTRTWALPTYNNHLYKQISSQSAGSTNDNVYFGYSTPWGYFDFNRFHCHFSPRDWQRLINNNWGFRPKKLNFKLFNIQVKEVTTNDGVTTIANNLTSTVQVFSDSEYQLPYVLGSAHQGCLPPFPADVFMIPQYGYLTLNNGSQSVGRSSFYCLEYFPSQMLRTGNNFTISYTFEDVPFHSSYAHSQSLDRLMNPLIDQYLYYLARTQSNAGGTAGNQELQFYQGGPTTMAEQAKNWLPGPCFRQQRVSKTLDQNNNSNFAWTGATKYHLNGRNSLVNPGVAMATHKDDEERFFPSSGVLIFGKTGAANKTTLENVLMTNEEEIRPTNPVATEEYGTVSSNLQAANTAAQTQVVNNQGALPGMVWQNRDVYLQGPIWAKIPHTDGNFHPSPLMGGFGLKHPPPQILIKNTPVPADPPTAFNQAKLNSFITQYSTGQVSVEIEWELQKENSKRWNPEIQYTSNYYKSTNVDFAVNTEGVYSEPRPIGTRYLTRNL

SEQ ID NO: 5086 - DNA, 2217 bp, Adeno-associated virus
atggctgccgatggttatcttccagattggctcgaggacaacctctctgagggcattcgcgagtggtgggacctgaaacctggagccccgaaacccaaagccaaccagcaaaagcaggacgacggccggggtctggtgcttcctggctacaagtacctcggacccttcaacggactcgacaagggggagcccgtcaacgcggcggacgcagcggccctcgagcacgacaaggcctacgaccagcagctcaaagcgggtgacaatccgtacctgcggtataatcacgccgacgccgagtttcaggagcgtctgcaagaagatacgtcttttgggggcaacctcgggcgagcagtcttccaggccaagaagcgggttctcgaacctctcggtctggttgaggaaggcgctaagacggctcctggaaagaagagaccggtagagccgtcaccacagcgttcccccgactcctccacgggcatcggcaagaaaggccagcagcccgccagaaagagactcaatttcggtcagactggcgactcagagtcagtccccgaccctcaacctatcggagaacctccagcagcgccctctagtgtgggatctggtacaatggctgcaggcggtggcgcaccaatggcagacaataacgaaggtgccgacggagtgggtagttcctcgggaaattggcattgcgattccacatggctgggcgacagagtcatcaccaccagcacccgaacctgggccctgcccgcctacaacaaccacctctacaagcaaatctccaacgggacctcgggaggcagcaccaacgacaacacctactttggctacagcaccccctgggggtattttgactttaacagattccactgccacttctcaccacgtgactggcagcgactcatcaacaacaactggggattccggcccaagagactcagcttcaagctcttcaacatccaggtcaaagaggtcacgcagaatgaaggcaccaagaccatcgccaataacctcaccagcaccatccaggtgtttacggactcggaataccagctgccgtacgtcctcggctctgcccaccagggctgcctgcctccgttcccggcggatgtcttcatgattcctcagtacggctacctgactctcaacaacggtagtcaggccgtgggacgttcctccttctactgcctggagtacttcccctctcagatgctgagaacgggcaacaacttttccttcagctacactttcgaggacgtgcctttccacagcagctacgcgcacagccagagtttggacaggctgatgaatcctctcatcgaccagtacctgtactacctgtcaagaacccagtctacgggaggcacagcgggaacccagcagttgctgttttctcaggccgggcctagcaacatgtcggctcaggccagaaactggctgcctggaccctgctacagacagcagcgcgtctccacgacactgtcgcaaaacaacaacagcaactttgcctggactggtgccaccaagtatcatctgagcggcagagactctctggtgaatccgggcgtcgccatggcaaccaacaaggacgacgaggaccgcttcttcccatccagcggcatcctcatgtttggcaagcagggagctggaaaagacaacgtggactatagcaacgtgatgctaaccagcgaggaagaaatcaagaccaccaaccccgtggccacagaacagtatggcgtggtggctgataacctacagcagcaaaacaccgctcctattgtgggggccgtcaacagccagggagccttacctggcatggtctggcagaaccgggacgtgtacctgcagggtcctatttgggccaagattcctcacacagatggcaactttcacccgtctcctttaatgggcggctttggacttaaacatccgcctcctcagatcctcatcaaaaacactcctgttcctgcggatcctccaacagcgttcaaccaggccaagctgaattcttccatcacgcagtacagcaccggacaagtcagcgtggagatcgagtgggagctgcagaaggagaacagcaagcgctggaacccagagattcagtatacttccaactactacaaatctacaaatgtggactttgctgttaatactgagggtgtttactctgagcctcgccccattggcactcgttacctcacccgtaatttgtaa

SEQ ID NO: 5087 - protein, 738 aa, Adeno-associated virus
MAADGYLPDWLEDNLSEGIREWWDLKPGAPKPKANQQKQDDGRGLVLPGYKYLGPFNGLDKGEPVNAADAAALEHDKAYDQQLKAGDNPYLRYNHADAEFQERLQEDTSFGGNLGRAVFQAKKRVLEPLGLVEEGAKTAPGKKRPVEPSPQRSPDSSTGIGKKGQQPARKRLNFGQTGDSESVPDPQPIGEPPAAPSSVGSGTMAAGGGAPMADNNEGADGVGSSSGNWHCDSTWLGDRVITTSTRTWALPAYNNHLYKQISNGTSGGSTNDNTYFGYSTPWGYFDFNRFHCHFSPRDWQRLINNNWGFRPKRLSFKLFNIQVKEVTQNEGTKTIANNLTSTIQVFTDSEYQLPYVLGSAHQGCLPPFPADVFMIPQYGYLTLNNGSQAVGRSSFYCLEYFPSQMLRTGNNFSFSYTFEDVPFHSSYAHSQSLDRLMNPLIDQYLYYLSRTQSTGGTAGTQQLLFSQAGPSNMSAQARNWLPGPCYRQQRVSTTLSQNNNSNFAWTGATKYHLSGRDSLVNPGVAMATNKDDEDRFFPSSGILMFGKQGAGKDNVDYSNVMLTSEEEIKTTNPVATEQYGVVADNLQQQNTAPIVGAVNSQGALPGMVWQNRDVYLQGPIWAKIPHTDGNFHPSPLMGGFGLKHPPPQILIKNTPVPADPPTAFNQAKLNSSITQYSTGQVSVEIEWELQKENSKRWNPEIQYTSNYYKSTNVDFAVNTEGVYSEPRPIGTRYLTRNL

SEQ ID NO: 5088 - protein, 736 aa, Adeno-associated virus
MAADGYLPDWLEDNLSEGIREWWDLKPGAPKPKANQQKQDDGRGLVLPGYKYLGPFNGLDKGEPVNAADAAALEHDKAYDQQLKAGDNPYLRYNHADAEFQERLQEDTSFGGNLGRAVFQAKKRVLEPLGLVEEGAKTAPGKKRPVEQSPQEPDSSSGIGKTGQQPAKKRLNFGQTGDSESVPDPQPLGEPPATPAAVGPTTMASGGGAPMADNNEGADGVGNASGNWHCDSTWLGDRVITTSTRTWALPTYNNHLYKQISSASTGASNDNHYFGYSTPWGYFDFNRFHCHFSPRDWQRLINNNWGFRPKRLNFKLFNIQVKEVTTNDGVTTIANNLTSTVQVFSDSEYQLPYVLGSAHQGCLPPFPADVFMIPQYGYLTLNNGSQAVGRSSFYCLEYFPSQMLRTGNNFTFSYTFEEVPFHSSYAHSQSLDRLMNPLIDQYLYYLNRTQNQSGSAQNKDLLFSRGSPAGMSVQPKNWLPGPCYRQQRVSKTKTDNNNSNFTWTGASKYNLNGRESIINPGTAMASHKDDEDKFFPMSGVMIFGKESAGASNTALDNVMITDEEEIKATNPVATERFGTVAVNFQSSSTDPATGDVHAMGALPGMVWQDRDVYLQGPIWAKIPHTDGHFHPSPLMGGFGLKNPPPQILIKNTPVPANPPAEFSATKFASFITQYSTGQVSVEIEWELQKENSKRWNPEVQYTSNYAKSANVDFTVDNNGLYTEPRPIGTRYLTRPL

SEQ ID NO: 5089 - DNA, 2217 bp, Adeno-associated virus
atggctgctgacggttatcttccagattggctcgaggacaacctctctgagggcattcgcgagtggtgggacctgaaacctggagcccccaagcccaaggccaaccagcagaagcaggacgacggccggggtctggtgcttcctggctacaagtacctcggacccttcaacggactcgacaagggggagcccgtcaacgcggcggacgcagcggccctcgagcacgacaaggcctacgaccagcagctcaaagcgggtgacaatccgtacctgcggtataaccacgccgacgccgagtttcaggagcgtctgcaagaagatacgtcttttgggggcaacctcgggcgagcagtcttccaggccaagaagcgggttctcgaacctctcggtctggttgaggaagctgctaagacggctcctggaaagaagagaccggtagaaccgtcacctcagcgttcccccgactcctccacgggcatcggcaagaaaggccagcagcccgctaaaaagagactgaactttggtcagactggcgactcagagtcagtccccgaccctcaaccaatcggagaaccaccagcaggcccctctggtctgggatctggtacaatggctgcaggcggtggcgctccaatggcagacaataacgaaggcgccgacggagtgggtagttcctcaggaaattggcattgcgattccacatggctgggcgacagagtcatcaccaccagcacccgaacctgggccctgcccacctacaacaaccacctctacaagcaaatatccaatgggacatcgggaggaagcaccaacgacaacacctacttcggctacagcaccccctgggggtattttgacttcaacagattccactgccacttctcaccacgtgactggcagcgactcatcaacaacaactggggattccggccaaaaagactcagcttcaagctcttcaacatccaggtcaaggaggtcacgcagaatgaaggcaccaagaccatcgccaataaccttaccagcacgattcaggtatttacggactcggaataccagctgccgtacgtcctcggctccgcgcaccagggctgcctgcctccgttcccggcggacgtcttcatgattccccagtacggctaccttacactgaacaatggaagtcaagccgtaggccgttcctccttctactgcctggaatattttccatctcaaatgctgcgaactggaaacaattttgaattcagctacaccttcgaggacgtgcctttccacagcagctacgcacacagccagagcttggaccgactgatgaatcctctcatcgaccagtacctgtactacttatccagaactcagtccacaggaggaactcaaggtacccagcaattgttattttctcaagctgggcctgcaaacatgtcggctcaggctaagaactggctacctggaccttgctaccggcagcagcgagtctctacgacactgtcgcaaaacaacaacagcaactttgcttggactggtgccaccaaatatcacctgaacggaagagactctttggtaaatcccggtgtcgccatggcaacccacaaggacgacgaggaacgcttcttcccgtcgagtggagtcctgatgtttggaaaacagggtgctggaagagacaatgtggactacagcagcgttatgctaaccagcgaagaagaaattaaaaccactaaccctgtagccacagaacaatacggtgtggtggctgacaacttgcagcaaaccaatacagggcctattgtgggaaatgtcaacagccaaggagccttacctggcatggtctggcagaaccgagacgtgtacctgcagggtcccatctgggccaagattcctcacacggacggcaacttccacccttcaccgctaatgggaggatttggactgaagcacccacctcctcagatcctgatcaagaacacgccggtacctgcggatcctccaacaacgttcagccaggcgaaattggcttccttcattacgcagtacagcaccggacaggtcagcgtggaaatcgagtgggagctgcagaaggagaacagcaaacgctggaacccagagattcagtacacttcaaactactacaaatctacaaatgtggactttgctgtcaatacagagggaacttattctgagcctcgccccattggtactcgttacctcacccgtaatctgtaa

SEQ ID NO: 5090 - protein, 738 aa, Adeno-associated virus
MAADGYLPDWLEDNLSEGIREWWDLKPGAPKPKANQQKQDDGRGLVLPGYKYLGPFNGLDKGEPVNAADAAALEHDKAYDQQLKAGDNPYLRYNHADAEFQERLQEDTSFGGNLGRAVFQAKKRVLEPLGLVEEGAKTAPGKKRPVEPSPQRSPDSSTGIGKKGQQPARKRLNFGQTGDSESVPDPQPLGEPPAAPSSVGSGTMAAGGGAPMADNNEGADGVGSSSGNWHCDSTWLGDRVITTSTRTWALPTYNNHLYKQISNGTSGGSTNDNTYFGYSTPWGYFDFNRFHCHFSPRDWQRLINNNWGFRPKRLSFKLFNIQVKEVTQNEGTKTIANNLTSTIQVFTDSEYQLPYVLGSAHQGCLPPFPADVFMIPQYGYLTLNNGSQAVGRSSFYCLEYFPSQMLRTGNNFSFSYTFEDVPFHSSYAHSQSLDRLMNPLIDQYLYYLSRTQSTGGTAGTQQLLFSQAGPSNMSAQARNWLPGPCYRQQRVSTTLSQNNNSNFAWTGATKYHLNGRDSLVNPGVAMATNKDDEDRFFPSSGILMFGKQGAGKDNVDYSNVMLTSEEEIKTTNPVATEQYGVVADNLQRQNTAPIVGAVNSQGALPGMVWQNRDVYLQGPIWAKIPHTDGNFHPSPLMGGFGLKHPPPQILIKNTPVPADPPTAFNQAKLNSFITQYSTGQVSVEIEWELQKENSKRWNPEIQYTSNYYKSTNVDFAVNTEGVYSEPRPIGTRYLTRNL

SEQ ID NO: 5091 - protein, 736 aa, Adeno-associated virus
MAADGYLPDWLEDNLSEGIREWLNLKPGAPQPKANQQKQDNARGLVLPGYKYLGPFNGLDKGDPVNEADAAALEHDKAYGQQLKAGDNPYLKYNHADAEFQERLQKDTSFGGNLGKAVFQAKKRILEPLGLVETPAKTAPGKKRPVDPSPQRSPDSSSGIGKKSPHPARKRLNFGQTGEAESVPDPQPIGEPPSDPSSVGSGTMAAGGGAPMADNNEGADGVGNSSGNWHCDSTWLGDRVITTSTRTWALPTYNNHLYKQISSQSGATNDNHYFGYSTPWGYFDFNRFHCHFSPRDWQRLINNNWGFRPKRLSFKLFNIQVKEVTQNDGTTTIANNLTSTVQVFTDSEYQLPYVLGSAHQGCLPPFPADVFMIPQYGYLTLNNGSQAVGRSSFYCLEYFPSQMLRTGNNFQFSYTFEDVPFHSSYAHSQSLDRLMNPLIDQYLYYLSKTQGTNATVQGAKLQFSQAGPSNMRDQARNWLPGPCYRQQRVSKTANDNNNSEYAWTGATKYHLNGRDSLVNPGPAMASHKDDEEKFFPMNGTLVFGKNGAGNSNVDIENVMITDEEEIRTTNPVATEQYGVVSDNLQSSNTRPITGDVDSQGVLPGMVWQDRDVYLQGPIWAKIPHTDGHFHPSPLMGGFGLKHPPPQILIKNTPVPANPATTFTPGKFASFITQYSTGQVSVQIEWELQKENSKRWNPEIQYTSNYNKSVNVDFTVDTNGVYSEPRPIGTRYLTRNL

SEQ ID NO: 5092 - protein, 736 aa, Adeno-associated virus; identical to SEQ ID NO: 4787

SEQ ID NO: 5093 - protein, 736 aa, Adeno-associated virus
MAADGYLPDWLEDNLSEGIREWWDLKPGAPKPKANQQKQDDGRGLVLPGYKYLGPFNGLDKGEPVNAADAAALEHDKAYDQQLKAGDNPYLRYNHADAEFQERLQEDTSFGGNLGRAVFQAKKRVLEPLGLVEEGAKTAPGKKRPVEQSPQEPDSSSGIGKTGQQPAKKRLNFGQTGDSESVPDPQPLGEPPAAPSGLGPNTMASGGGAPMADNNEGADGVGNSSGNWHCDSTWLGDRVITTSTRTWALPTYNNHLYKQISNGTSGGSTNDNTYFGYSTPWGYFDFNRFHCHFSPRDWQRLINNNWGFRPKRLNFKLFNIQVKEVTTNEGTKTIANNLTSTVQVFTDSEYQLPYVLGSAHQGCLPPFPADVFMVPQYGYLTLNNGSQALGRSSFYCLEYFPSQMLRTGNNFQFSYTFEDVPFHSSYAHSQSLDRLMNPLIDQYLYYLVRTQTTGTGGTQTLAFSQAGPSSMANQARNWVPGPCYRQQRVSTTTNQNNNSNFAWTGAAKFKLNGRDSLMNPGVAMASHKDDEDRFFPSSGVLIFGKQGAGNDGVDYSQVLITDEEEIKATNPVATEEYGAVAINNQAANTQAQTGLVHNQGVIPGMVWQNRDVYLQGPIWAKIPHTDGNFHPSPLMGGFGLKHPPPQILIKNTPVPADPPLTFNQAKLNSFITQYSTGQVSVEIEWELQKENSKRWNPEIQYTSNYYKSTNVDFAVNTEGVYSEPRPIGTRYLTRNL

SEQ ID NO: 5094 - DNA, 2211 bp, Adeno-associated virus 1; identical to SEQ ID NO: 4977

SEQ ID NO: 5095 - protein, 736 aa, Adeno-associated virus 1; identical to SEQ ID NO: 5088

SEQ ID NO: 5096 - DNA, 4718 bp, Adeno-associated virus 1
ttgcccactccctctctgcgcgctcgctcgctcggtggggcctgcggaccaaaggtccgcagacggcagagctctgctctgccggccccaccgagcgagcgagcgcgcagagagggagtgggcaactccatcactaggggtaatcgcgaagcgcctcccacgctgccgcgtcagcgctgacgtaaattacgtcataggggagtggtcctgtattagctgtcacgtgagtgcttttgcgacattttgcgacaccacgtggccatttagggtatatatggccgagtgagcgagcaggatctccattttgaccgcgaaatttgaacgagcagcagccatgccgggcttctacgagatcgtgatcaaggtgccgagcgacctggacgagcacctgccgggcatttctgactcgtttgtgagctgggtggccgagaaggaatgggagctgcccccggattctgacatggatctgaatctgattgagcaggcacccctgaccgtggccgagaagctgcagcgcgacttcctggtccaatggcgccgcgtgagtaaggccccggaggccctcttctttgttcagttcgagaagggcgagtcctacttccacctccatattctggtggagaccacgggggtcaaatccatggtgctgggccgcttcctgagtcagattagggacaagctggtgcagaccatctaccgcgggatcgagccgaccctgcccaactggttcgcggtgaccaagacgcgtaatggcgccggaggggggaacaaggtggtggacgagtgctacatccccaactacctcctgcccaagactcagcccgagctgcagtgggcgtggactaacatggaggagtatataagcgcctgtttgaacctggccgagcgcaaacggctcgtggcgcagcacctgacccacgtcagccagacccaggagcagaacaaggagaatctgaaccccaattctgacgcgcctgtcatccggtcaaaaacctccgcgcgctacatggagctggtcgggtggctggtggaccggggcatcacctccgagaagcagtggatccaggaggaccaggcctcgtacatctccttcaacgccgcttccaactcgcggtcccagatcaaggccgctctggacaatgccggcaagatcatggcgctgaccaaatccgcgcccgactacctggtaggccccgctccgcccgcggacattaaaaccaaccgcatctaccgcatcctggagctgaacggctacgaacctgcctacgccggctccgtctttctcggctgggcccagaaaaggttcgggaagcgcaacaccatctggctgtttgggccggccaccacgggcaagaccaacatcgcggaagccatcgcccacgccgtgcccttctacggctgcgtcaactggaccaatgagaactttcccttcaatgattgcgtcgacaagatggtgatctggtgggaggagggcaagatgacggccaaggtcgtggagtccgccaaggccattctcggcggcagcaaggtgcgcgtggaccaaaagtgcaagtcgtccgcccagatcgaccccacccccgtgatcgtcacctccaacaccaacatgtgcgccgtgattgacgggaacagcaccaccttcgagcaccagcagccgttgcaggaccggatgttcaaatttgaactcacccgccgtctggagcatgactttggcaaggtgacaaagcaggaagtcaaagagttcttccgctgggcgcaggatcacgtgaccgaggtggcgcatgagttctacgtcagaaagggtggagccaacaaaagacccgcccccgatgacgcggataaaagcgagcccaagcgggcctgcccctcagtcgcggatccatcgacgtcagacgcggaaggagctccggtggactttgccgacaggtaccaaaacaaatgttctcgtcacgcgggcatgcttcagatgctgtttccctgcaagacatgcgagagaatgaatcagaatttcaacatttgcttcacgcacgggacgagagactgttcagagtgcttccccggcgtgtcagaatctcaaccggtcgtcagaaagaggacgtatcggaaactctgtgccattcatcatctgctggggcgggctcccgagattgcttgctcggcctgcgatctggtcaacgtggacctggatgactgtgtttctgagcaataaatgacttaaaccaggtatggctgccgatggttatcttccagattggctcgaggacaacctctctgagggcattcgcgagtggtgggacttgaaacctggagccccgaagcccaaagccaaccagcaaaagcaggacgacggccggggtctggtgcttcctggctacaagtacctcggacccttcaacggactcgacaagggggagcccgtcaacgcggcggacgcagcggccctcgagcacgacaaggcctacgaccagcagctcaaagcgggtgacaatccgtacctgcggtataaccacgccgacgccgagtttcaggagcgtctgcaagaagatacgtcttttgggggcaacctcgggcgagcagtcttccaggccaagaagcgggttctcgaacctctcggtctggttgaggaaggcgctaagacggctcctggaaagaaacgtccggtagagcagtcgccacaagagccagactcctcctcgggcatcggcaagacaggccagcagcccgctaaaaagagactcaattttggtcagactggcgactcagagtcagtccccgatccacaacctctcggagaacctccagcaacccccgctgctgtgggacctactacaatggcttcaggcggtggcgcaccaatggcagacaataacgaaggcgccgacggagtgggtaatgcctcaggaaattggcattgcgattccacatggctgggcgacagagtcatcaccaccagcacccgcacctgggccttgcccacctacaataaccacctctacaagcaaatctccagtgcttcaacgggggccagcaacgacaaccactacttcggctacagcaccccctgggggtattttgatttcaacagattccactgccacttttcaccacgtgactggcagcgactcatcaacaacaattggggattccggcccaagagactcaacttcaaactcttcaacatccaagtcaaggaggtcacgacgaatgatggcgtcacaaccatcgctaataaccttaccagcacggttcaagtcttctcggactcggagtaccagcttccgtacgtcctcggctctgcgcaccagggctgcctccctccgttcccggcggacgtgttcatgattccgcaatacggctacctgacgctcaacaatggcagccaagccgtgggacgttcatccttttactgcctggaatatttcccttctcagatgctgagaacgggcaacaactttaccttcagctacacctttgaggaagtgcctttccacagcagctacgcgcacagccagagcctggaccggctgatgaatcctctcatcgaccaatacctgtattacctgaacagaactcaaaatcagtccggaagtgcccaaaacaaggacttgctgtttagccgtgggtctccagctggcatgtctgttcagcccaaaaactggctacctggaccctgttatcggcagcagcgcgtttctaaaacaaaaacagacaacaacaacagcaattttacctggactggtgcttcaaaatataacctcaatgggcgtgaatccatcatcaaccctggcactgctatggcctcacacaaagacgacgaagacaagttctttcccatgagcggtgtcatgatttttggaaaagagagcgccggagcttcaaacactgcattggacaatgtcatgattacagacgaagaggaaattaaagccactaaccctgtggccaccgaaagatttgggaccgtggcagtcaatttccagagcagcagcacagaccctgcgaccggagatgtgcatgctatgggagcattacctggcatggtgtggcaagatagagacgtgtacctgcagggtcccatttgggccaaaattcctcacacagatggacactttcacccgtctcctcttatgggcggctttggactcaagaacccgcctcctcagatcctcatcaaaaacacgcctgttcctgcgaatcctccggcggagttttcagctacaaagtttgcttcattcatcacccaatactccacaggacaagtgagtgtggaaattgaatgggagctgcagaaagaaaacagcaagcgctggaatcccgaagtgcagtacacatccaattatgcaaaatctgccaacgttgattttactgtggacaacaatggactttatactgagcctcgccccattggcacccgttaccttacccgtcccctgtaattacgtgttaatcaataaaccggttgattcgtttcagttgaactttggtctcctgtccttcttatcttatcggttaccatggttatagcttacacattaactgcttggttgcgcttcgcgataaaagacttacgtcatcgggttacccctagtgatggagttgcccactccctctctgcgcgctcgctcgctcggtggggcctgcggaccaaaggtccgcagacggcagagctctgctctgccggccccaccgagcgagcgagcgcgcagagagggagtgggcaa

SEQ ID NO: 5097 - DNA, 255 bp, Adeno-associated virus 10
ggtaattcctccggaaattggcattgcgattccacatggctgggcgacagagtcatcaccaccagcacccgaacctgggtcctgcccacctacaacaaccacatctacaagcaaatctccagcgagacaggagccaccaacgacaaccactacttcggctacagcaccccctgggggtattttgactttaacagattccactgccacttttcaccacgtgactggcagcgactcatcaacaacaactggggattc

SEQ ID NO: 5098 - protein, 738 aa, Adeno-associated virus 10
MAADGYLPDWLEDNLSEGIREWWDLKPGAPKPKANQQKQDDGRGLVLPGYKYLGPFNGLDKGEPVNAADAAALEHDKAYDQQLKAGDNPYLRYNHADAEFQERLQEDTSFGGNLGRAVFQAKKRVLEPLGLVEEAAKTAPGKKRPVEPSPQRSPDSSTGIGKKGQQPAKKRLNFGQTGESESVPDPQPIGEPPAGPSGLGSGTMAAGGGAPMADNNEGADGVGSSSGNWHCDSTWLGDRVITTSTRTWALPTYNNHLYKQISNGTSGGSTNDNTYFGYSTPWGYFDFNRFHCHFSPRDWQRLINNNWGFRPKRLSFKLFNIQVKEVTQNEGTKTIANNLTSTIQVFTDSEYQLPYVLGSAHQGCLPPFPADVFMIPQYGYLTLNNGSQAVGRSSFYCLEYFPSQMLRTGNNFEFSYTFEDVPFHSSYAHSQSLDRLMNPLIDQYLYYLSRTQSTGGTQGTQQLLFSQAGPANMSAQAKNWLPGPCYRQQRVSTTLSQNNNSNFAWTGATKYHLNGRDSLVNPGVAMATHKDDEERFFPSSGVLMFGKQGAGRDNVDYSSVMLTSEEEIKTTNPVATEQYGVVADNLQQANTGPIVGNVNSQGALPGMVWQNRDVYLQGPIWAKIPHTDGNFHPSPLMGGFGLKHPPPQILIKNTPVPADPPTTFSQAKLASFITQYSTGQVSVEIEWELQKENSKRWNPEIQYTSNYYKSTNVDFAVNTEGTYSEPRPIGTRYLTRNL

SEQ ID NO: 5099 - protein, 738 aa, Adeno-associated virus 10; identical to SEQ ID NO: 4793

SEQ ID NO: 5100 - DNA, 258 bp, Adeno-associated virus 11
ggtaattcctccggaaattggcattgcgattccacatggctgggcgacagagtcatcaccaccagcacccgaacctgggccctgccaacctacaacaaccacctctacaaacaaatctccagcgcttcaacgggggccagcaacgacaaccactactttggctacagcaccccctgggggtattttgactttaacagattccactgccacttctcaccacgtgactggcagcgactcatcaacaacaactggggattc

SEQ ID NO: 5101 - DNA, 255 bp, Adeno-associated virus 12
ggtaattcctccggaaattggcattgcgattccacatggctgggcgaccgagtcattaccaccagcacccggacttgggccctgcccacctacaacaaccacctctacaagcaaatctccagccaatcgggtgccaccaacgacaaccactacttcggctacagcaccccttgggggtattttgatttcaacagattccactgccatttctcaccacgtgactggcagcgactcatcaacaacaactggggattc

SEQ ID NO: 5102 - DNA, 2208 bp, Adeno-associated virus 2
atggctgccgatggttatcttccagattggctcgaggacactctctctgaaggaataagacagtggtggaagctcaaacctggcccaccaccaccaaagcccgcagagcggcataaggacgacagcaggggtcttgtgcttcctgggtacaagtacctcggacccttcaacggactcgacaagggagagccggtcaacgaggcagacgccgcggccctcgagcacgacaaagcctacgaccggcagctcgacagcggagacaacccgtacctcaagtacaaccacgccgacgcggagtttcaggagcgccttaaagaagatacgtcttttgggggcaacctcggacgagcagtcttccaggcgaaaaagagggttcttgaacctctgggcctggttgaggaacctgttaagacggctccgggaaaaaagaggccggtagagcactctcctgtggagccagactcctcctcgggaaccggaaaggcgggccagcagcctgcaagaaaaagattgaattttggtcagactggagacgcagactcagtacctgacccccagcctctcggacagccaccagcagccccctctggtctgggaactaatacgatggctacaggcagtggcgcaccaatggcagacaataacgagggcgccgacggagtgggtaattcctcgggaaattggcattgcgattccacatggatgggcgacagagtcatcaccaccagcacccgaacctgggccctgcccacctacaacaaccacctctacaaacaaatttccagccaatcaggagcctcgaacgacaatcactactttggctacagcaccccttgggggtattttgacttcaacagattccactgccacttttcaccacgtgactggcaaagactcatcaacaacaactggggattccgacccaagagactcaacttcaagctctttaacattcaagtcaaagaggtcacgcagaatgacggtacgacgacgattgccaataaccttaccagcacggttcaggtgtttactgactcggagtaccagctcccgtacgtcctcggctcggcgcatcaaggatgcctcccgccgttcccagcagacgtcttcatggtgccacagtatggatacctcaccctgaacaacgggagtcaggcagtaggacgctcttcattttactgcctggagtactttccttctcagatgctgcgtaccggaaacaactttaccttcagctacacttttgaggacgttcctttccacagcagctacgctcacagccagagtctggaccgtctcatgaatcctctcatcgaccagtacctgtattacttgagcagaacaaacactccaagtggaaccaccacgcagtcaaggcttcagttttctcaggccggagcgagtgacattcgggaccagtctaggaactggcttcctggaccctgttaccgccagcagcgagtatcaaagacatctgcggataacaacaacagtgaatactcgtggactggagctaccaagtaccacctcaatggcagagactctctggtgaatccgggcccggccatggcaagccacaaggacgatgaagaaaagttttttcctcagagcggggttctcatctttgggaagcaaggctcagagaaaacaaatgtggacattgaaaaggtcatgattacagacgaagaggaaatcaggacaaccaatcccgtggctacggagcagtatggttctgtatctaccaacctccagagaggcaacagacaagcagctaccgcagatgtcaacacacaaggcgttcttccaggcatggtctggcaggacagagatgtgtaccttcaggggcccatctgggcaaagattccacacacggacggacattttcacccctctcccctcatgggtggattcggacttaaacaccctcctccacagattctcatcaagaacaccccggtacctgcgaatccttcgaccaccttcagtgcggcaaagtttgcttccttcatcacacagtactccacgggacaggtcagcgtggagatcgagtgggagctgcagaaggaaaacagcaaacgctggaatcccgaaattcagtacacttccaactacaacaagtctgttaatgtggactttactgtggacactaatggcgtgtattcagagcctcgccccattggcaccagatacctgactcgtaatctgtaa

SEQ ID NO: 5103 - protein, 735 aa, Adeno-associated virus 2 [sequence omitted]

SEQ ID NO: 5104 - protein, 621 aa, Adeno-associated virus 2
MPGFYEIVIKVPSDLDGHLPGISDSFVNWVAEKEWELPPDSDMDLNLIEQAPLTVAEKLQRDFLTEWRRVSKAPEALFFVQFEKGESYFHMHVLVETTGVKSMVLGRFLSQIREKLIQRIYRGIEPTLPNWFAVTKTRNGAGGGNKVVDECYIPNYLLPKTQPELQWAWTNMEQYLSACLNLTERKRLVAQHLTHVSQTQEQNKENQNPNSDAPVIRSKTSARYMELVGWLVDKGITSEKQWIQEDQASYISFNAASNSRSQIKAALDNAGKIMSLTKTAPDYLVGQQPVEDISSNRIYKILELNGYDPQYAASVFLGWATKKFGKRNTIWLFGPATTGKTNIAEAIAHTVPFYGCVNWTNENFPFNDCVDKMVIWWEEGKMTAKVVESAKAILGGSKVRVDQKCKSSAQIDPTPVIVTSNTNMCAVIDGNSTTFEHQQPLQDRMFKFELTRRLDHDFGKVTKQEVKDFFRWAKDHVVEVEHEFYVKKGGAKKRPAPSDADISEPKRVRESVAQPSTSDAEASINYADRYQNKCSRHVGMNLMLFPCRQCERMNQNSNICFTHGQKDCLECFPVSESQPVSVVKKAYQKLCYIHHIMGKVPDACTACDLVNVDLDDCIFEQ

SEQ ID NO: 5105 - DNA, 4675 bp, Adeno-associated virus 2
ttggccactccctctctgcgcgctcgctcgctcactgaggccgggcgaccaaaggtcgcccgacgcccgggctttgcccgggcggcctcagtgagcgagcgagcgcgcagagagggagtggccaactccatcactaggggttcctggaggggtggagtcgtgacgtgaattacgtcatagggttagggaggtcctgtattagaggtcacgtgagtgttttgcgacattttgcgacaccatgtggtcacgctgggtatttaagcccgagtgagcacgcagggtctccattttgaagcgggaggtttgaacgcgcagccgccatgccggggttttacgagattgtgattaaggtccccagcgaccttgacgggcatctgcccggcatttctgacagctttgtgaactgggtggccgagaaggaatgggagttgccgccagattctgacatggatctgaatctgattgagcaggcacccctgaccgtggccgagaagctgcagcgcgactttctgacggaatggcgccgtgtgagtaaggccccggaggcccttttctttgtgcaatttgagaagggagagagctacttccacatgcacgtgctcgtggaaaccaccggggtgaaatccatggttttgggacgtttcctgagtcagattcgcgaaaaactgattcagagaatttaccgcgggatcgagccgactttgccaaactggttcgcggtcacaaagaccagaaatggcgccggaggcgggaacaaggtggtggatgagtgctacatccccaattacttgctccccaaaacccagcctgagctccagtgggcgtggactaatatggaacagtatttaagcgcctgtttgaatctcacggagcgtaaacggttggtggcgcagcatctgacgcacgtgtcgcagacgcaggagcagaacaaagagaatcagaatcccaattctgatgcgccggtgatcagatcaaaaacttcagccaggtacatggagctggtcgggtggctcgtggacaaggggattacctcggagaagcagtggatccaggaggaccaggcctcatacatctccttcaatgcggcctccaactcgcggtcccaaatcaaggctgccttggacaatgcgggaaagattatgagcctgactaaaaccgcccccgactacctggtgggccagcagcccgtggaggacatttccagcaatcggatttataaaattttggaactaaacgggtacgatccccaatatgcggcttccgtctttctgggatgggccacgaaaaagttcggcaagaggaacaccatctggctgtttgggcctgcaactaccgggaagaccaacatcgcggaggccatagcccacactgtgcccttctacgggtgcgtaaactggaccaatgagaactttcccttcaacgactgtgtcgacaagatggtgatctggtgggaggaggggaagatgaccgccaaggtcgtggagtcggccaaagccattctcggaggaagcaaggtgcgcgtggaccagaaatgcaagtcctcggcccagatagacccgactcccgtgatcgtcacctccaacaccaacatgtgcgccgtgattgacgggaactcaacgaccttcgaacaccagcagccgttgcaagaccggatgttcaaatttgaactcacccgccgtctggatcatgactttgggaaggtcaccaagcaggaagtcaaagactttttccggtgggcaaaggatcacgtggttgaggtggagcatgaattctacgtcaaaaagggtggagccaagaaaagacccgcccccagtgacgcagatataagtgagcccaaacgggtgcgcgagtcagttgcgcagccatcgacgtcagacgcggaagcttcgatcaactacgcagacaggtaccaaaacaaatgttctcgtcacgtgggcatgaatctgatgctgtttccctgcagacaatgcgagagaatgaatcagaattcaaatatctgcttcactcacggacagaaagactgtttagagtgctttcccgtgtcagaatctcaacccgtttctgtcgtcaaaaaggcgtatcagaaactgtgctacattcatcatatcatgggaaaggtgccagacgcttgcactgcctgcgatctggtcaatgtggatttggatgactgcatctttgaacaataaatgatttaaatcaggtatggctgccgatggttatcttccagattggctcgaggacactctctctgaaggaataagacagtggtggaagctcaaacctggcccaccaccaccaaagcccgcagagcggcataaggacgacagcaggggtcttgtgcttcctgggtacaagtacctcggacccttcaacggactcgacaagggagagccggtcaacgaggcagacgccgcggccctcgagcacgtacaaagcctacgaccggcagctcgacagcggagacaacccgtacctcaagtacaaccacgccgacgcggagtttcaggagcgccttaaagaagatacgtcttttgggggcaacctcggacgagcagtcttccaggcgaaaaagagggttcttgaacctctgggcctggttgaggaacctgttaagacggctccgggaaaaaagaggccggtagagcactctcctgtggagccagactcctcctcgggaaccggaaaggcgggccagcagcctgcaagaaaaagattgaattttggtcagactggagacgcagactcagtacctgacccccagcctctcggacagccaccagcagccccctctggtctgggaactaatacgatggctacaggcagtggcgcaccaatggcagacaataacgagggcgccgacggagtgggtaattcctccggaaattggcattgcgattccacatggatgggcgacagagtcatcaccaccagcacccgaacctgggccctgcccacctacaacaaccacctctacaaacaaatttccagccaatcaggagcctcgaacgacaatcactactttggctacagcaccccttgggggtattttgacttcaacagattccactgccacttttcaccacgtgactggcaaagactcatcaacaacaactggggattccgacccaagagactcaacttcaagctctttaacattcaagtcaaagaggtcacgcagaatgacggtacgacgacgattgccaataaccttaccagcacggttcaggtgtttactgactcggagtaccagctcccgtacgtcctcggctcggcgcatcaaggatgcctcccgccgttcccagcagacgtcttcatggtgccacagtatggatacctcaccctgaacaacgggagtcaggcagtaggacgctcttcattttactgcctggagtactttccttctcagatgctgcgtaccggaaacaactttaccttcagctacacttttgaggacgttcctttccacagcagctacgctcacagccagagtctggaccgtctcatgaatcctctcatcgaccagtacctgtattacttgagcagaacaaacactccaagtggaaccaccacgcagtcaaggcttcagttttctcaggccggagcgagtgacattcgggaccagtctaggaactggcttcctggaccctgttaccgccagcagcgagtatcaaagacatctgcggataacaacaacagtgaatactcgtggactggagctaccaagtaccacctcaatggcagagactctctggtgaatccggccatggcaagccacaaggacgatgaagaaaagttttttcctcagagcggggttctcatctttgggaagcaaggctcagagaaaacaaatgtgaacattgaaaaggtcatgattacagacgaagaggaaatcggaacaaccaatcccgtggctacggagcagtatggttctgtatctaccaacctccagagaggcaacagacaagcagctaccgcagatgtcaacacacaaggcgttcttccaggcatggtctggcaggacagagatgtgtaccttcaggggcccatctgggcaaagattccacacacggacggacattttcacccctctcccctcatgggtggattcggacttaaacaccctcctccacagattctcatcaagaacaccccggtacctgcgaatccttcgaccaccttcagtgcggcaaagtttgcttccttcatcacacagtactccacgggacacggtcagcgtggagatcgagtgggagctgcagaaggaaaacagcaaacgctggaatcccgaaattcagtacacttccaactacaacaagtctgttaatcgtggacttaccgtggatactaatggcgtgtattcagagcctcgccccattggcaccagatacctgactcgtaatctgtaattgcttgttaatcaataaaccgtttaattcgtttcagttgaactttggtctctgcgtatttctttcttatctagtttccatggctacgtagataagtagcatggcgggttaatcattaactacaaggaacccctagtgatggagttggccactccctctctgcgcgctcgctcgctcactgaggccgggcgaccaaaggtcgcccgacgcccgggctttgcccgggcggcctcagtgagcgagcgagcgcgcagagagggagtggccaa

SEQ ID NO: 5106 - DNA, 4679 bp, Adeno-associated virus 2
ttggccactccctctctgcgcgctcgctcgctcactgaggccgggcgaccaaaggtcgcccgacgcccgggctttgcccgggcggcctcagtgagcgagcgagcgcgcagagagggagtggccaactccatcactaggggttcctggaggggtggagtcgtgacgtgaattacgtcatagggttagggaggtcctgtattagaggtcacgtgagtgttttgcgacattttgcgacaccatgtggtcacgctgggtatttaagcccgagtgagcacgcagggtctccattttgaagcgggaggtttgaacgcgcagccgccatgccggggttttacgagattgtgattaaggtccccagcgaccttgacgggcatctgcccggcatttctgacagctttgtgaactgggtggccgagaaggaatgggagttgccgccagattctgacatggatctgaatctgattgagcaggcacccctgaccgtggccgagaagctgcagcgcgactttctgacggaatggcgccgtgtgagtaaggccccggaggcccttttctttgtgcaatttgagaagggagagagctacttccacatgcacgtgctcgtggaaaccaccggggtgaaatccatggttttgggacgtttcctgagtcagattcgcgaaaaactgattcagagaatttaccgcgggatcgagccgactttgccaaactggttcgcggtcacaaagaccagaaatggcgccggaggcgggaacaaggtggtggatgagtgctacatccccaattacttgctccccaaaacccagcctgagctccagtgggcgtggactaatatggaacagtatttaagcgcctgtttgaatctcacggagcgtaaacggttggtggcgcagcatctgacgcacgtgtcgcagacgcaggagcagaacaaagagaatcagaatcccaattctgatgcgccggtgatcagatcaaaaacttcagccaggtacatggagctggtcgggtggctcgtggacaaggggattacctcggagaagcagtggatccaggaggaccaggcctcatacatctccttcaatgcggcctccaactcgcggtcccaaatcaaggctgccttggacaatgcgggaaagattatgagcctgactaaaaccgcccccgactacctggtgggccagcagcccgtggaggacatttccagcaatcggatttataaaattttggaactaaacgggtacgatccccaatatgcggcttccgtctttctgggatgggccacgaaaaagttcggcaagaggaacaccatctggctgtttgggcctgcaactaccgggaagaccaacatcgcggaggccatagcccacactgtgcccttctacgggtgcgtaaactggaccaatgagaactttcccttcaacgactgtgtcgacaagatggtgatctggtgggaggaggggaagatgaccgccaaggtcgtggagtcggccaaagccattctcggaggaagcaaggtgcgcgtggaccagaaatgcaagtcctcggcccagatagacccgactcccgtgatcgtcacctccaacaccaacatgtgcgccgtgattgacgggaactcaacgaccttcgaacaccagcagccgttgcaagaccggatgttcaaatttgaactcacccgccgtctggatcatgactttgggaaggtcaccaagcaggaagtcaaagactttttccggtgggcaaaggatcacgtggttgaggtggagcatgaattctacgtcaaaaagggtggagccaagaaaagacccgcccccagtgacgcagatataagtgagcccaaacgggtgcgcgagtcagttgcgcagccatcgacgtcagacgcggaagcttcgatcaactacgcagacaggtaccaaaacaaatgttctcgtcacgtgggcatgaatctgatgctgtttccctgcagacaatgcgagagaatgaatcagaattcaaatatctgcttcactcacggacagaaagactgtttagagtgctttcccgtgtcagaatctcaacccgtttctgtcgtcaaaaaggcgtatcagaaactgtgctacattcatcatatcatgggaaaggtgccagacgcttgcactgcctgcgatctggtcaatgtggatttggatgactgcatctttgaacaataaatgatttaaatcaggtatggctgccgatggttatcttccagattggctcgaggacactctctctgaaggaataagacagtggtggaagctcaaacctggcccaccaccaccaaagcccgcagagcggcataaggacgacagcaggggtcttgtgcttcctgggtacaagtacctcggacccttcaacggactcgacaagggagagccggtcaacgaggcagacgccgcggccctcgagcacgacaaagcctacgaccggcagctcgacagcggagacaacccgtacctcaagtacaaccacgccgacgcggagtttcaggagcgccttaaagaagatacgtcttttgggggcaacctcggacgagcagtcttccaggcgaaaaagagggttcttgaacctctgggcctggttgaggaacctgttaagacggctccgggaaaaaagaggccggtagagcactctcctgtggagccagactcctcctcgggaaccggaaaggcgggccagcagcctgcaagaaaaagattgaattttggtcagactggagacgcagactcagtacctgacccccagcctctcggacagccaccagcagccccctctggtctgggaactaatacgatggctacaggcagtggcgcaccaatggcagacaataacgagggcgccgacggagtgggtaattcctccggaaattggcattgcgattccacatggatgggcgacagagtcatcaccaccagcacccgaacctgggccctgcccacctacaacaaccacctctacaaacaaatttccagccaatcaggagcctcgaacgacaatcactactttggctacagcaccccttgggggtattttgacttcaacagattccactgccacttttcaccacgtgactggcaaagactcatcaacaacaactggggattccgacccaagagactcaacttcaagctctttaacattcaagtcaaagaggtcacgcagaatgacggtacgacgacgattgccaataaccttaccagcacggttcaggtgtttactgactcggagtaccagctcccgtacgtcctcggctcggcgcatcaaggatgcctcccgccgttcccagcagacgtcttcatggtgccacagtatggatacctcaccctgaacaacgggagtcaggcagtaggacgctcttcattttactgcctggagtactttccttctcagatgctgcgtaccggaaacaactttaccttcagctacacttttgaggacgttcctttccacagcagctacgctcacagccagagtctggaccgtctcatgaatcctctcatcgaccagtacctgtattacttgagcagaacaaacactccaagtggaaccaccacgcagtcaaggcttcagttttctcaggccggagcgagtgacattcgggaccagtctaggaactggcttcctggaccctgttaccgccagcagcgagtatcaaagacatctgcggataacaacaacagtgaatactcgtggactggagctaccaagtaccacctcaatggcagagactctctggtgaatccgggcccggccatggcaagccacaaggacgatgaagaaaagttttttcctcagagcggggttctcatctttgggaagcaaggctcagagaaaacaaatgtggacattgaaaaggtcatgattacagacgaagaggaaatcaggacaaccaatcccgtggctacggagcagtatggttctgtatctaccaacctccagagaggcaacagacaagcagctaccgcagatgtcaacacacaaggcgttcttccaggcatggtctggcaggacagagatgtgtaccttcaggggcccatctgggcaaagattccacacacggacggacattttcacccctctcccctcatgggtggattcggacttaaacaccctcctccacagattctcatcaagaacaccccggtacctgcgaatccttcgaccaccttcagtgcggcaaagtttgcttccttcatcacacagtactccacgggacaggtcagcgtggagatcgagtgggagctgcagaaggaaaacagcaaacgctggaatcccgaaattcagtacacttccaactacaacaagtctgttaatgtggactttactgtggacactaatggcgtgtattcagagcctcgccccattggcaccagatacctgactcgtaatctgtaattgcttgttaatcaataaaccgtttaattcgtttcagttgaactttggtctctgcgtatttctttcttatctagtttccatggctacgtagataagtagcatggcgggttaatcattaactacaaggaacccctagtgatggagttggccactccctctctgcgcgctcgctcgctcactgaggccgggcgaccaaaggtcgcccgacgcccgggctttgcccgggcggcctcagtgagcgagcgagcgcgcagagagggagtggccaa

SEQ ID NO: 5107 - protein, 735 aa, Adeno-associated virus 2
MAADGYLPDWLEDTLSEGIRQWWKLKPGPPPPKPAERHKDDSRGLVLPGYKYLGPFNGLDKGEPVNEADAAALEHDKAYDRQLDSGDNPYLKYNHADAEFQERLKEDTSFGGNLGRAVFQAKKRVLEPLGLVEEPVKTAPGKKRPVEHSPVEPDSSSGTGKAGQQPARKRLNFGQTGDADSVPDPQPLGEPPATPAAVGPTTMASGGGAPMADNNEGADGVGNASGNWHCDSTWLGDRVITTSTRTWALPTYNNHLYKQISSASTGASNDNHYFGYSTPWGYFDFNRFHCHFSPRDWQRLINNNWGFRPKRLNFKLFNIQVKEVTQNDGTTTIANNLTSTVQVFTDSEYQLPYVLGSAHQGCLPPFPADVFMIPQYGYLTLNNGSQAVGRSSFYCLEYFPSQMLRTGNNFTFSYTFEDVPFHSSYAHSQSLDRLMNPLIDQYLYYLNRTQNQSGSAQDKALLFSRGSPAGMSVQPKNWLPGPCYRQQRVSKTKTDNNNSNFTWTGASKYNLNGRESIINPGTAMASHKDDKDKFFPMSGVMIFGKESAGASNTALDNVMITDEEEIKATNPVATERFGTVAVNFQSSSTDPATGDVHVMGALPGMVWQDRDVYLQGPIWAKIPHTDGHFHPSPLMGGFGLKHPPPQILIKNTPVPANPPAEFSATKFASFITQYSTGQVSVEIEWELQKENSKRWNPEVQYTSNYAKSANVDFTVDNNGLYTEPRPIGTRYLTRP

SEQ ID NO: 5108 - protein, 740 aa, Adeno-associated virus 2
MAADGYLPDWLEDTLSEGIRQWWKLKPGPPPPKPAERHKDDSRGLVLPGYKYLGPFNGLDKGEPVNAADAAALEHDKAYDRQLDSGDNPYLKYNHADAEFQERLKEDTSFGGNLGRAVFQAKKRVLEPLGLVEEPVKTAPGKKRPVEHSPVEPDSSSGTGKAGQQPARKRLNFGQTGDADSVPDPQPLGQPPAAPSGLGTNTMATGSGAPMADNNEGADGVGNSSGNWHCDSTWMGDRVITTSTRTWALPTYNNHLYKQISSQSGASNDNHYFGYSTPWGYFDFNRFHCHFSPRDWQRLINNNWGFRPKRLNFKLFNIQVKEVTQNDGTTTIANNLTSTVQVFTDSEYQLPYVLGSAHQGCLPPFPADVFMVPQYGYLTLNNGSQAVGRSSFYCLEYFPSQMLRTGNNFTFSYTFEDVPFHSSYAHSQSLDRLMNPLIDQYLYYLSRTNTPSGTTTQSGLQFSQAGASDIRDQSRNWLPGPCYRQQRVSKTSADNNNSEYSWTGATKYHLNGRDSLVNPGPAMASHKDDEEKFFPQSGVLIFGKQGSEKTNVDIEKVMITDEEEIRTTNPVATEQYGSVSTNLQRGNRQAATADVNTQGVLPGMVWQDRDVYLQGPIWAKIPHTDGHFHPSPLMGGFGLKHPPPQILIKNTPVPANPSTTFSAAKFASFITQYSTGQVSVEIEWELQKENSKRWNPEIQYTSNYNKSVNVDFTVDTNGVYSEPRPIGTRYLTRNLLLAAA

SEQ ID NO: 5109 - protein, 734 aa, Adeno-associated virus 2
MAADGYLPDWLEDTLSEGIRQWWKLKPGPPPPKPAERHKDDSRGLVLPGYKYLGPFNGLDKGEPVNEADAAALEHDKAYDRQLDSGDNPYLKYNHADAEFQERLKEDTSFGGNLGRAVFQAKKRVLEPLGLVEEPVKTAPGKKRPVEHSPVEPDSSSGTGKAGQQPARKRLNFGQTGDADSVPDPQPLGQPPAAPSGLGTNTMATGSGAPMADNNEGADGVGNSSGNWHCDSTWMGDRVITTSTRTWALPTYNNHLYKQISSQSGASNDNHYFGYSTPWGYFDFNRFHCHFSPRDWQRLINNNWGFRPKRLNFKLFNIQVKEVTQNDGTTTIANNLTSTVQVFTDSEYQLPYVLGSAHQGCLPPFPADVFMVPQYGYLTLNNGSQAVGRSSFYCLEYFPSQMLRTGNNFTFSYTFEDVPFHSSYAHSQSLDRLMNPLIDQYLYYLSRTNTPSGTTTQSGLQFSQAGASDIRDQSRNWLPGPCYRQQRVSKTSADNNNSEYSWTGATMYHLNGRDSLVNPGPAMASHKDDEEKFFPQSGVLIFGKQGSEKTNVDIEKVMITDEEEIRTTNPVATEQYGSVSTNLQRGNRQAATADVNTQGVLPGMVWQDRDVYLQGPIWAKIPHTDGHFHPSPLMGGFGLKHPPPQILIKNTPVPANPSTTFSAAKFASFITQYSTGQVSVEIEWELQKENSKRWNPEIQYTSNYNKSINVDFTVDTNGVYSEPRPIGTRYLTRN

SEQ ID NO: 5110 - protein, 734 aa, Adeno-associated virus 2
MAADGYLPDWLEDTLSEGIRQWWKLKPGPPPPKPAERHKDDSRGLVLPGYKYLGPFNGLDKGEPVNEADAAALEHDKAYDRQLDSGDNPYLKYNHADAEFQERLKEDTSFGGNLGRAVFQAKKRVLEPLGLVEEPVKTAPGKKRPVEHSPVEPDSSSGTGKAGQQPARKRLNFGQTGDADSVPDPQPLGQPPAAPSGLGTNTMATGSGAPMADNNEGADGVGNSSGNWHCDSTWMGDRVITTSTRTWALPTYNNHLYKQISSQSGASNDNHYFGYSTPWGYFDFNRFHCHFSPRDWQRLINNNWGFRPKRLNFKLFNIQVKEVTQNDGTTTIANNLTSTVQVFTDSEYQLPYVLGSAHQGCLPPFPADVFMVPQYGYLTLNNGSQAVGRSSFYCLEYFPSQMLRTGNNFTFSYTFEDVPFHSSYAHSQSLDRLMNPLIDQYLYYLSRTNTPSGTTTQSGLQFSQAGASDIRDQSRNWLPGPCYRQQRVSKTSADNNNSEYSWTGATKYHLNGRDSLVNPGPAMASHKDDEEKFFPQSGVLIFGKQGSEKTNVDIEKVMITDEEEIRTTNPVATEQYGSVSTNLQRGNRQAATADVNTQGVLPGMVWQDRDVYLQGPIWAKIPHTDGHFHPSPLMGGFGLKHPPPQILIKNTPVPANPSTTFSEAKFASFITQYSTGQVSVEIEWELQKENSKRWNPEIQYTSNYNKSVNVDFTVDTNGVYSEPRPIGTRYLTRN

SEQ ID NO: 5111 - protein, 739 aa, Adeno-associated virus 2
MAADGYLPDWLEDTLSEGIRQWWKLKPGPPPPKPAERHKDDSRGLVLPGYKYLGPFNGLDKGEPVNEADAAALEHDKAYDRQLDSGDNPYLKYNHADAEFQERLKEDTSFGGNLGRAVFQAKKRVLEPLGLVEEPVKTAPGKKRPVEHSPVEPDSSSGTGKAGQQPARKRLNFGQTGDADSVPDPQPLGQPPAAPSGLGTNTMATGSGAPMADNNEGADGVGNSSGNWHCDSTWMGDRVITTSTRTWALPTYNNHLYKQISSQSGASNDNHYFGYSTPWGYFDFNRFHCHFSPRDWQRLINNNWGFRPKRLNFKLFNIQVKEVTQNDGTTTIANNLTSTVQVFTDSEYQLPYVLGSAHQGCLPPFPADVFMVPQYGYLTLNNGSQAVGRSSFYCLEYFPSQMLRTGNNFTFSYTFEDVPFHSSYAHSQSLDRLMNPLIDQYLYYLSRTNTPSGTTTQSGLQFSQAGASDIRDQSRNWLPGPCYRQQRVSKTSADNNNSEYSWTGATKYHLNGRDSLVNPGPAMASHKDDEEKFFPQSGVLIFGKQGSEKTNVDIEKVMITDEEEIRTTNPVATEQYGSVSTNLQRGNRQAATADVNTQGVLPGMVWQDRDVYLQGPIWAKIPHTDGHFHPSPLMGGFGLKHPPPQILIKNTPVPANPSTTFSAAKFASFITQYSTGQVSVEIEWELQKENSKRWNPEIQYTSNYNKSVNVDFTVDTNGVYSEPRPIGTRYLTRNLLLAA

SEQ ID NO: 5112 - protein, 725 aa, Adeno-associated virus 2
MAADGYLPDWLEDTLSEGIRQWWKLKPGPPPPKPAERHKDDSRGLVLPGYKYLGPFNGLDKGEPVNEADAAALEHDKAYDRQLDSGDNPYLKYNHADAEFQERLKEDTSFGGNLGRAVFQAKKRVLEPLGLVEEPVKTAPGKKRPVEHSPVEPDSSSGTGKAGQQPARKRLNFGQTGDADSVPDPQPLGQPPAAPSGLGTNTMATGSGAPMADNNEGADGVGNSSGNWHCDSTWMGDRVITTSTRTWALPTYNNHLYKQISSQSGASNDNHYFGYSTPWGYFDFNRFHCHFSPRDWQRLINNNWGFRPKRLNFKLFNIQVKEVTQNDGTTTIANNLTSTVQVFTDSEYQLPYVLGSAHQGCLPPFPADVFMVPQYGYLTLNNGSQAVGRSSFYCLEYFPSQMLRTGNNFTFSYTFEDVPFHSSYAHSQSLDRLMNPLIDQYLYYLSRTNTPSGTTTQSGLQFSQAGASDIRDQSRNWLPGPCYRQQRVSKTSADNNNSEYSWTGATKYHLNGRDSLVNPGPAMASHKDDEEKFFPQSGVLIFGKQGSEKTNVDIEKVMITDEEEIRTTNPVATEQYGSVSTNLQRGNRQAATADVNTQGVLPGMVWQDRDVYLQGPIWAKIPHTDGHFHPSPLMGGFGLKHPPPQILIKNTPVPANPSTTFSAAKFASFITQYSTGQVSVEIEWELQKENSKRWNPEIQYTSNYNKSVNVDFTVDTNGVYSEPRP

SEQ ID NO: 5113 - protein, 707 aa, Adeno-associated virus 2
MAADGYLPDWLEDTLSEGIRQWWKLKPGPPPPKPAERHKDDSRGLVLPGYKYLGPFNGLDKGEPVNEADAAALEHDKAYDRQLDSGDNPYLKYNHADAEFQERLKEDTSFGGNLGRAVFQAKKRVLEPLGLVEEPVKTAPGKKRPVEHSPVEPDSSSGTGKAGQQPARKRLNFGQTGDADSVPDPQPLGQPPAAPSGLGTNTMATGSGAPMADNNEGADGVGNSSGNWHCDSTWMGDRVITTSTRTWALPTYNNHLYKQISSQSGASNDNHYFGYSTPWGYFDFNRFHCHFSPRDWQRLINNNWGFRPKRLNFKLFNIQVKEVTQNDGTTTIANNLTSTVQVFTDSEYQLPYVLGSAHQGCLPPFPADVFMVPQYGYLTLNNGSQAVGRSSFYCLEYFPSQMLRTGNNFTFSYTFEDVPFHSSYAHSQSLDRLMNPLIDQYLYYLSRTNTPSGTTTQSGLQFSQAGASDIRDQSRNWLPGPCYRQQRVSKTSADNNNSEYSWTGATKYHLNGRDSLVNPGPAMASHKDDEEKFFPQSGVLIFGKQGSEKTNVDIEKVMITDEEEIRTTNPVATEQYGSCIYQPPERQQTSSYRRCQHTRRSSRHGLAGQRCVPSGAHLGKDSTHGRTFSPLSPHGWIRTTPSSTDSHQEHPGTCESFDHLQCGKVCFLHHTVLHGTGQRGDRVRAAEGKQQTLESRNSVHFQLQQVC

SEQ ID NO: 5114 - protein, 739 aa, Adeno-associated virus 2; identical to SEQ ID NO: 5111

SEQ ID NO: 5115 - protein, 737 aa, Adeno-associated virus 2
MASDGYLPDWLEDNLSEGIREWWDLKPGAPKPKANQQKQDDGRGLVLPGYKYLGPFNGLDKGEPVNAADAAALEHDKAYDQQLKAGDNPYLRYNHADAEFQERLQEDTSFGGNLGRAVFQAKKRVLEPFGLVEEGAKTAPGKKRPVEQSPQEPDSSSGIGKTGQQPAKKRLNFGQTGDSESVPDPQPLGEPPATPAAVGPTTMASGGGAPMADNNEGADGVGNASGNWHCDSTWLGDRVITTSTRTWALPTYNNHLYKQISSASTGASNDNHYFGYSTPWGYFDFNRFHCHFSPRDWQRLINNNWGFRPKRLNFKLFNIQVKEVTTNDGTTTIANNLTSTVQVFTDSEYQLPYVLGSAHQGCLPPFPADVFMVPQYGYLTLNNGSQAVGRSSFYCLEYFPSQMLRTGNNFTFSYTFEDVPFHSSYAHSQSLDRLMNPLIDQYLYYLSRTNTPSGTTTQSGLQFSQAGASDIRDQSRNWLPGPCYRQQRVSKTSADNNNSEYSWTGATKYHLNGRDSLVNPGPAMASHKDDEEKFFPQSGVLIFGKQGSEKTNVDIEKVMITDEEEIRTTNPVATEQYGSVSTNLQRGNRQAATADVNTQGVLPGMVWQDRDVYLQGPIWAKIPHTDGHFHPSPLMGGFGLKHHPPQILIKNTPVPANPSTTFSAAKFASFITQYSTGQVSVEIEWELQKENSKRWNPEIQYTSNYNKSVNVDFTVDTNGVYSEPRPIGTRYLTRNLL

SEQ ID NO: 5116 - protein, 741 aa, Adeno-associated virus 2
MAADGYLPDWLEDTLSEGIREWWALKPGAPKPKANQQKQDDGRGLVLPGYKYLGPFNGLDKGEPVNEADAAALEHDKAYDQQLQAGDNPYLRYNHADAEFQERLQEDTSFGGNLGRAVFQAKKRVLEPLGLVEEPVKTAPGKKRPVEHSPVEPDSSSGTGKSGQQPARKRLNFGQTGDADSVPDPQPLGQPPAAPSGLGTNTMATGSGAPMADNNEGADGVGNSSGNWHCDSTWMGDRVITTSTRTWALPTYNNHLYKQISSQSGASNDNHYFGYSTPWGYFDFNRFHCHFSPRDWQRLINNNWGFRPKRLNFKLFNIQVKEVTQNDGTTTIANNLTSTVQVFTDSEYQLPYVLGSAHQGCLPPFPADVFMVPQYGYLTLNNGSQAVGRSSFYCLEYFPSQMLRTGNNFTFSYTFEDVPFHSSYAHSQSLDRLMNPLIDQYLYYLSRTNTPSGTTTQSGLQFSQAGASDIRDQSRNWLPGPCYRQQRVSKTSADNNNSEYSWTGATKYHLNGRDSLVNPGPAMASHKDDEEKFFPQSGVLIFGKQGSEKTNVDIEKVMITDEEEIRTTNPVATEQYGSVSTNLQRGNLANHNNTTNARQAATADVNTQGVLPGMVWQDRDVYLQGPIWAKIPHTDGHFHPSPLMGGFGLKHPPPQILIKNTPVPANPSTTFSAAKFASFITQYSTGQVSVEIEWELQKENSKRWNPEIQYTSNYNKSINVDFTVDTNGVYSEPRPIGTRYL

SEQ ID NO: 5117 - protein, 730 aa, Adeno-associated virus 2
MASDGYLPDWLEDNLSEGIREWWDLKPGAPKPKANQQKQDDGRGLVLPGYKYLGPFNGLDKGEPVNAADAAALEHDKAYDQQLKAGDNPYLRYNHADAEFQERLQEDTSFGGNLGRAVFQAKKRVLEPFGLVEEGAKTAPGKKRPVEQSPQEPDSSSGIGKTGQQPAKKRLNFGQTGDSESVPDPQPLGEPPATPAAVGPTTMASGGGAPMADNNEGADGVGNASGNWHCDSTWLGDRVITTSTRTWALPTYNNHLYKQISSASTGASNDNHYFGYSTPWGYFDFNRFHCHFSPRDWQRLINNNWGFRPKRLNFKLFNIQVKEVTTNDGVTTIANNLTSTVQVFSDSEYQLPYVLGSAHQGCLPPFPADVFMIPQYGYLTLNNGSQAVGRSSFYCLEYFPSQMLRTGNNFTFSYTFEDVPFHSSYAHSQSLDRLMNPLIDQYLYYLNRTQNQSGSAQNNDLLFSRGSPAGMSVQPKNWLPGPCYRQQRVSKTKTDNNNSNFTWTGASKYNLNGRESIINPGTAMASHKDDKDKFFPMSGVMIFGKESAGASNTALDNVMITDEEEIKATNPVATERFGTVAVNLQSSSTDPATGDVHVMGALPGMVWQDRDVYLQGPIWAKIPHTDGHFHPSPLMGGFGLKNPPPQILIKNTPVPANPPAEFSATKFASFITQYSTGQVSVEIEWELQKENSKRWNPEVQYTSNYAKSANVDFTVDNNGLYTEPRPIGTR

SEQ ID NO: 5118 - protein, 735 aa, Adeno-associated virus 2
  MOD_RES (239)..(239): Any amino acid
MASDGYLPDWLEDNLSEGIREWWDLKPGAPKPKANQQKQDDGRGLVLPGYKYLGPFNGLDKGEPVNAADAAALEHDKAYDQQLKAGDNPYLRYNHADAEFQERLQEDTSFGGNLGRAVFQAKKRVLEPFGLVEEGAKTAPGKKRPVEQSPQEPDSSSGIGKTGQQPAKKRLNFGQTGDSESVPDPQPLGEPPATPAAVGPTTMASGGGAPMADNNEGADGVGNASGNWHCDSTWLGDRXITTSTRTWALPTYNNHLYKQISSASTGASNDNHYFGYSTPWGYFDFNRFHCHFSPRDWQRLINNNWGFRPKRLNFKLFNIQVKEVTTNDGVTTIANNLTSTVQVFSDSEYQLPYVLGSAHQGCLPPFPADVFMIPQYGYLTLNNGSQAVGRSSFYCLEYFPSQMLRTGNNFTFSYTFEDVPFHSSYAHSQSLDRLMNPLIDQYLYYLNRTQNQSGSAQNNDLLFSRGSPAGMSVQPKNWLPGPCYRQQRVSKTKTDNNNSNFTWTGASKYNLNGRESIINPGTAMASHKDDKDKFFPMSGVMIFGKESAGASNTALDNVMITDEEEIKATNPVATERFGTVAVNLQSSSTDPATGDVHVMGALPGMVWQDRDVYLQGPIWAKIPHTDGHFHPSPLMGGFGLKNPPPQILIKNTPVPANPPAEFSATKFASFITQYSTGQVSVEIEWELQKENSKRWNPEVQYTSNYAKSANVDFTVDNNGLYTEPRPIGTRYLTRP

SEQ ID NO: 5119 - protein, 733 aa, Adeno-associated virus 2
MASDGYLPDWLEDNLSEGIREWWDLKPGAPKPKANQQKQDDGRGLVLPGYKYLGPFNGLDKGEPVNAADAAALEHDKAYDQQLKAGDNPYLRYNHADAEFQERLQEDTSFGGNLGRAVFLAKKRVLEPFGLVEEGAKTAPGKKRPVEQSPQEPDSSSGIGKTGQQPAKKRLNFGQTGDSESVPDPQPLGEPPATPAAVGPTTMASGGGAPMADNNEGADGVGNASGNWHCDSTWLGDRVITTSTRTWALPTYNNHLYKQISSASTGASNDNHYFGYSTPWGYFDFNRFHCHFSPRDWQRLINNNWGFRPKRLNFKLFNIQVKEVTTNDGVTTIANNLTSTVQVFSDSEYQLPYVLGSAHQGCLPPFPADVFMIPQYGYLTLNNGSQAVGRSSFYCLEYFPSQMLRTGNNFTFSYTFEDVPFHSSYAHSQSLDRLMNPLIDQYLYYLNRTQNQSGSAQNNDLLFSRGSPAGMSVQPKNWLPGPCYRQQRVSKTKTDNNNSNFTWTGASKYNLNGRESIINPGTAMASHKDDKDKFFPMSGVMIFGKESAGASNTALDNVMITDEEEIKATNPVATERFGTVAVNLQSSSTDPATGDVHVMGALPGMVWQDRDVYLQGPIWAKIPHTDGHFHPSPLMGGFGLKNPPPQILIKNTPVPANPPAEFSATKFASFITQYSTGQVSVEIEWELQKENSKRWNPEVQYTSNYAKSANVDFTVDNNGLYTEPRPIGTRYLT

SEQ ID NO: 5120 - protein, 734 aa, Adeno-associated virus 2
MAADGYLPDWLEDTLSEGIRQWWKLKPGPPPPKPAERHKDDSRGLVLPGCKYLGPFNGLDKGEPVNEADAAALEHDKAYDRQLDSGDNPYLKYNHADAEFQERLKEDTSFGGNLGRAVFQAKKRVLEPLGLVEEPVKTAPGKKRPVEHSPVEPDSSSGTGKAGQQPARKRLNFGQTGDADSVPDPQPLGQPPAAPSGLGTNTMATGSGAPMADNNEGADGVGNSSGNWHCDSTWMGDRVITTSTRTWALPTYNNHLYKQISSQSGASNDNHYFGYSTPWGYFDFNRFHCHFSPRDWQRLINNNWGFRPKRLNFKLFNIQVKEVTQNDGTTTIANNLTSTVQVFSDSEYQLPYVLGSAHQGCLPPFPADVFMIPQYGYLTLNNGSQAVGRSSFYCLEYFPSQMLRTGNNFTFNYTFEDVPFHSSYAHSQSLDRLMNPLIDQYLYYLNRTQNQSGSAQNNDLLFSRGSPAGMSVQPKNWLPGPCYRQQRVSKTKTDNNNSNFTWTGASKYNLNGRESIINPGTAMASHKDDKDKFFPMSGVMIFGKESAGASNTALDNVMITDEEEIKATNPVATERFGTVAVNLQSSSTDPATGDVHVMGALPGMVWQDRDVYLQGPIWAKIPHTDGHFHPSPLMGGFGLKNPPPQILIKNTPVPANPPAEFSATKFASFITQYSTGQVSVEIEWELQKENSKRWNPEVQYTSNYAKSANVDFTVDNNGLYTEPRPIGTRYLTRP

SEQ ID NO: 5121 - protein, 734 aa, Adeno-associated virus 2
MAADGYLPDWLEDTLSEGIRQWWKLKPGPPPPKPAERHKDDSRGLVLPGYKYLGPFNGLDKGEPVNEADAAALEHDKAYDRQLDSGDNPYLKYNHADAEFQERLKEDTSFGGNLGRAVFQAKKRVLEPLGLVEEPVKTAPGKKRPVEHSPVEPDSSSGTGKAGQQPARKRLNFGQTGDADSVPDPQPLGQPPAAPSGLGTNTMATGSGAPMADNNEGADGVGNSSGNWHCDSTWMGDRVITTSTRTWALSTYNNHLYKQISSQSGASNDNHYFGYSTPWGYFDFNRFHCHFSPRDWQRLINNNWGFRPKRLNFKLFNIQVKEVTQNDGTTTIANNLTSTVQVFTDSEYQLPYVLGSAHQGCLPPFPADVFMVPQYGYLTLNNGSQAVGRSSFYCLEYFPSQMLRTGNNFTFSYTFEDVPFHSSYAHSQSLDRLMNPLIDQYLYYLSRTNTPSGTTTQSRLQFSQAGASDIRDQSRNWLPGPCYRQQRVSKTSADNNNSEYSWTGATKYHLNGRDSLVNPGPAMASHKDDEEKFFPQSGVLIFGKQGSEKTNVDIEKVMITDEEEIRTTNPVATEQYGSVSTNLQRGNRQAATADVNTQGVLPGMVWQDRDVYLQGPIWAKIPHTDGHFHPSPLMGGFGLKHPPPQILIKNTPVPANPSTTFSAAKFASFITQYSTGQVSVEIEWELQKENSKRWNPEIQYTSNYNKSINVDFTVDTNGVYSEPRPIGTRYLTRN

SEQ ID NO: 5122 - protein, 738 aa, Adeno-associated virus 2
MAADGYLPDWLEDTLSEGIRQWWKLKPGPPPPKPAERHKDDSRGLVLPGYKYLGPFNGLDKGEPVNEADAAALEHDKAYDRQLDGGDNPYLKYNHADAEFQERLKEDTSFGGNLGRAVFQAKKRVLEPLGLVEEPVKTAPGKKRPVEHSPVEPDSSSGTGKAGQQPARKRLNFGQTGDADSVPDPQPLGQPPAAPSGLGTNTMATGSGAPMADNNEGADGVGNSSGNWHCDSTWMGDRVITTSTRTWALPTYNNHLYKQISSQSGASNDNHYFGYSTPWGYFDFNRFHCHFSPRDWQRLINNNWGFRPKRLNFKLFNIQVKEVTQNDGTTTIANNLTSTVQVFTDSEYQLPYVLGSAHQGCLPPFPADVFMVPQYGYLTLNNGSQAVGRSSFYCLEYFPSQMLRTGNNFTFSYTFEDVPFHSSYAHSQSLDRLMNPLIDQYLYYLSRTNTPSGTTTQSGLQFSQAGASDIRDQSRNWLPGPCYRQQRVSKTSADNNNSEYSWTGATKYHLNGRDSLVNPGPAMASHKDDEEKFFPQSGVLIFGKQGSEKTNVDIEKVMITDEEEIRTTNPVATEQYGSVSTNLQRGNRQAATADVNTQGVLPGMVWQDRDVYLQGPIWAKIPHTDGHFHPSPLMGGFGLKHPPPQILIKNTPVPANPSTTFSAAKFASFITQYSTGQVSVEIEWELQKENSKRWNPEIQYTSNYNKSVNVDFTVDTNGVYSEPRPIGTRYLTRNLLRP

SEQ ID NO: 5123 - protein, 736 aa, Adeno-associated virus 3; identical to SEQ ID NO: 4757

SEQ ID NO: 5124 - DNA, 4726 bp, Adeno-associated virus 3
ttggccactccctctatgcgcactcgctcgctcggtggggcctggcgaccaaaggtcgccagacggacgtgctttgcacgtccggccccaccgagcgagcgagtgcgcatagagggagtggccaactccatcactagaggtatggcagtgacgtaacgcgaagcgcgcgaagcgagaccacgcctaccagctgcgtcagcagtcaggtgacccttttgcgacagtttgcgacaccacgtggccgctgagggtatatattctcgagtgagcgaaccaggagctccattttgaccgcgaaatttgaacgagcagcagccatgccggggttctacgagattgtcctgaaggtcccgagtgacctggacgagcgcctgccgggcatttctaactcgtttgttaactgggtggccgagaaggaatgggacgtgccgccggattctgacatggatccgaatctgattgagcaggcacccctgaccgtggccgaaaagcttcagcgcgagttcctggtggagtggcgccgcgtgagtaaggccccggaggccctcttttttgtccagttcgaaaagggggagacctacttccacctgcacgtgctgattgagaccatcggggtcaaatccatggtggtcggccgctacgtgagccagattaaagagaagctggtgacccgcatctaccgcggggtcgagccgcagcttccgaactggttcgcggtgaccaaaacgcgaaatggcgccgggggcgggaacaaggtggtggacgactgctacatccccaactacctgctccccaagacccagcccgagctccagtgggcgtggactaacatggaccagtatttaagcgcctgtttgaatctcgcggagcgtaaacggctggtggcgcagcatctgacgcacgtgtcgcagacgcaggagcagaacaaagagaatcagaaccccaattctgacgcgccggtcatcaggtcaaaaacctcagccaggtacatggagctggtcgggtggctggtggaccgcgggatcacgtcagaaaagcaatggattcaggaggaccaggcctcgtacatctccttcaacgccgcctccaactcgcggtcccagatcaaggccgcgctggacaatgcctccaagatcatgagcctgacaaagacggctccggactacctggtgggcagcaacccgccggaggacattaccaaaaatcggatctaccaaatcctggagctgaacgggtacgatccgcagtacgcggcctccgtcttcctgggctgggcgcaaaagaagttcgggaagaggaacaccatctggctctttgggccggccacgacgggtaaaaccaacatcgcggaagccatcgcccacgccgtgcccttctacggctgcgtaaactggaccaatgagaactttcccttcaacgattgcgtcgacaagatggtgatctggtgggaggagggcaagatgacggccaaggtcgtggagagcgccaaggccattctgggcggaagcaaggtgcgcgtggaccaaaagtgcaagtcatcggcccagatcgaacccactcccgtgatcgtcacctccaacaccaacatgtgcgccgtgattgacgggaacagcaccaccttcgagcatcagcagccgctgcaggaccggatgtttgaatttgaacttacccgccgtttggaccatgactttgggaaggtcaccaaacaggaagtaaaggactttttccggtgggcttccgatcacgtgactgacgtggctcatgagttctacgtcagaaagggtggagctaagaaacgccccgcctccaatgacgcggatgtaagcgagccaaaacgggagtgcacgtcacttgcgcagccgacaacgtcagacgcggaagcaccggcggactacgcggacaggtaccaaaacaaatgttctcgtcacgtgggcatgaatctgatgctttttccctgtaaaacatgcgagagaatgaatcaaatttccaatgtctgttttacgcatggtcaaagagactgtggggaatgcttccctggaatgtcagaatctcaacccgtttctgtcgtcaaaaagaagacttatcagaaactgtgtccaattcatcatatcctgggaagggcacccgagattgcctgttcggcctgcgatttggccaatgtggacttggatgactgtgtttctgagcaataaatgacttaaaccaggtatggctgctgacggttatcttccagattggctcgaggacaacctttctgaaggcattcgtgagtggtgggctctgaaacctggagtccctcaacccaaagcgaaccaacaacaccaggacaaccgtcggggtcttgtgcttccgggttacaaatacctcggacccggtaacggactcgacaaaggagagccggtcaacgaggcggacgcggcagccctcgaacacgacaaagcttacgaccagcagctcaaggccggtgacaacccgtacctcaagtacaaccacgccgacgccgagtttcaggagcgtcttcaagaagatacgtcttttgggggcaaccttggcagagcagtcttccaggccaaaaagaggatccttgagcctcttggtctggttgaggaagcagctaaaacggctcctggaaagaagggggctgtagatcagtctcctcaggaaccggactcatcatctggtgttggcaaatcgggcaaacagcctgccagaaaaagactaaatttcggtcagactggagactcagagtcagtcccagaccctcaacctctcggagaaccaccagcagcccccacaagtttgggatctaatacaatggcttcaggcggtggcgcaccaatggcagacaataacgagggtgccgatggagtgggtaattcctcaggaaattggcattgcgattcccaatggctgggcgacagagtcatcaccaccagcaccagaacctgggccctgcccacttacaacaaccatctctacaagcaaatctccagccaatcaggagcttcaaacgacaaccactactttggctacagcaccccttgggggtattttgactttaacagattccactgccacttctcaccacgtgactggcagcgactcattaacaacaactggggattccggcccaagaaactcagcttcaagctcttcaacatccaagttagaggggtcacgcagaacgatggcacgacgactattgccaataaccttaccagcacggttcaagtgtttacggactcggagtatcagctcccgtacgtgctcgggtcggcgcaccaaggctgtctcccgccgtttccagcggacgtcttcatggtccctcagtatggatacctcaccctgaacaacggaagtcaagcggtgggacgctcatccttttactgcctggagtacttcccttcgcagatgctaaggactggaaataacttccaattcagctataccttcgaggatgtaccttttcacagcagctacgctcacagccagagtttggatcgcttgatgaatcctcttattgatcagtatctgtactacctgaacagaacgcaaggaacaacctctggaacaaccaaccaatcacggctgctttttagccaggctgggcctcagtctatgtctttgcaggccagaaattggctacctgggccctgctaccggcaacagagactttcaaagactgctaacgacaacaacaacagtaactttccttggacagcggccagcaaatatcatctcaatggccgcgactcgctggtgaatccaggaccagctatggccagtcacaaggacgatgaagaaaaatttttccctatgcacggcaatctaatatttggcaaagaagggacaacggcaagtaacgcagaattagataatgtaatgattacggatgaagaagagattcgtaccaccaatcctgtggcaacagagcagtatggaactgtggcaaataacttgcagagctcaaatacagctcccacgactggaactgtcaatcatcagggggccttacctggcatggtgtggcaagatcgtgacgtgtaccttcaaggacctatctgggcaaagattcctcacacggatggacactttcatccttctcctctgatgggaggctttggactgaaacatccgcctcctcaaatcatgatcaaaaatactccggtaccggcaaatcctccgacgactttcagcccggccaagtttgcttcatttatcactcagtactccactggacaggtcagcgtggaaattgagtgggagctacagaaagaaaacagcaaacgttggaatccagagattcagtacacttccaactacaacaagtctgttaatgtggactttactgtagacactaatggtgtttatagtgaacctcgccctattggaacccggtatctcacacgaaacttgtgaatcctggttaatcaataaaccgtttaattcgtttcagttgaactttggctcttgtgcacttctttatctttatcttgtttccatggctactgcgtagataagcagcggcctgcggcgcttgcgcttcgcggtttacaactgctggttaatatttaactctcgccatacctctagtgatggagttggccactccctctatgcgcactcgctcgctcggtggggcctggcgaccaaaggtcgccagacggacgtgctttgcacgtccggccccaccgagcgagcgagtgcgcatagagggagtggccaa

SEQ ID NO: 5125 - protein, 736 aa, Adeno-associated virus 3A; identical to SEQ ID NO: 4757

SEQ ID NO: 5126 - protein, 624 aa, Adeno-associated virus 3A
MPGFYEIVLKVPSDLDERLPGISNSFVNWVAEKEWDVPPDSDMDPNLIEQAPLTVAEKLQREFLVEWRRVSKAPEALFFVQFEKGETYFHLHVLIETIGVKSMVVGRYVSQIKEKLVTRIYRGVEPQLPNWFAVTKTRNGAGGGNKVVDDCYIPNYLLPKTQPELQWAWTNMDQYLSACLNLAERKRLVAQHLTHVSQTQEQNKENQNPNSDAPVIRSKTSARYMELVGWLVDRGITSEKQWIQEDQASYISFNAASNSRSQIKAALDNASKIMSLTKTAPDYLVGSNPPEDITKNRIYQILELNGYDPQYAASVFLGWAQKKFGKRNTIWLFGPATTGKTNIAEAIAHAVPFYGCVNWTNENFPFNDCVDKMVIWWEEGKMTAKVVESAKAILGGSKVRVDQKCKSSAQIEPTPVIVTSNTNMCAVIDGNSTTFEHQQPLQDRMFEFELTRRLDHDFGKVTKQEVKDFFRWASDHVTDVAHEFYVRKGGAKKRPASNDADVSEPKRECTSLAQPTTSDAEAPADYADRYQNKCSRHVGMNLMLFPCKTCERMNQISNVCFTHGQRDCGECFPGMSESQPVSVVKKKTYQKLCPIHHILGRAPEIACSACDLANVDLDDCVSEQ

SEQ ID NO: 5127 - protein, 736 aa, Adeno-associated virus 3B
MAADGYLPDWLEDNLSEGIREWWALKPGVPQPKANQQHQDNRRGLVLPGYKYLGPGNGLDKGEPVNEADAAALEHDKAYDQQLKAGDNPYLKYNHADAEFQERLQEDTSFGGNLGRAVFQAKKRILEPLGLVEEAAKTAPGKKRPVDQSPQEPDSSSGVGKSGKQPARKRLNFGQTGDSESVPDPQPLGEPPAAPTSLGSNTMASGGGAPMADNNEGADGVGNSSGNWHCDSQWLGDRVITTSTRTWALPTYNNHLYKQISSQSGASNDNHYFGYSTPWGYFDFNRFHCHFSPRDWQRLINNNWGFRPKKLSFKLFNIQVKEVTQNDGTTTIANNLTSTVQVFTDSEYQLPYVLGSAHQGCLPPFPADVFMVPQYGYLTLNNGSQAVGRSSFYCLEYFPSQMLRTGNNFQFSYTFEDVPFHSSYAHSQSLDRLMNPLIDQYLYYLNRTQGTTSGTTNQSRLLFSQAGPQSMSLQARNWLPGPCYRQQRLSKTANDNNNSNFPWTAASKYHLNGRDSLVNPGPAMASHKDDEEKFFPMHGNLIFGKEGTTASNAELDNVMITDEEEIRTTNPVATEQYGTVANNLQSSNTAPTTRTVNDQGALPGMVWQDRDVYLQGPIWAKIPHTDGHFHPSPLMGGFGLKHPPPQIMIKNTPVPANPPTTFSPAKFASFITQYSTGQVSVEIEWELQKENSKRWNPEIQYTSNYNKSVNVDFTVDTNGVYSEPRPIGTRYLTRNL

SEQ ID NO: 5128 - protein, 624 aa, Adeno-associated virus 3B
MPGFYEIVLKVPSDLDEHLPGISNSFVNWVAEKEWELPPDSDMDPNLIEQAPLTVAEKLQREFLVEWRRVSKAPEALFFVQFEKGETYFHLHVLIETIGVKSMVVGRYVSQIKEKLVTRIYRGVEPQLPNWFAVTKTRNGAGGGNKVVDDCYIPNYLLPKTQPELQWAWTNMDQYLSACLNLAERKRLVAQHLTHVSQTQEQNKENQNPNSDAPVIRSKTSARYMELVGWLVDRGITSEKQWIQEDQASYISFNAASNSRSQIKAALDNASKIMSLTKTAPDYLVGSNPPEDITKNRIYQILELNGYDPQYAASVFLGWAQKKFGKRNTIWLFGPATTGKTNIAEAIAHAVPFYGCVNWTNENFPFNDCVDKMVIWWEEGKMTAKVVESAKAILGGSKVRVDQKCKSSAQIEPTPVIVTSNTNMCAVIDGNSTTFEHQQPLQDRMFKFELTRRLDHDFGKVTKQEVKDFFRWASDHVTDVAHEFYVRKGGAKKRPASNDADVSEPKRQCTSLAQPTTSDAEAPADYADRYQNKCSRHVGMNLMLFPCKTCERMNQISNVCFTHGQRDCGECFPGMSESQPVSVVKKKTYQKLCPIHHILGRAPEIACSACDLANVDLDDCVSEQ

SEQ ID NO: 5129 - DNA, 4722 bp, Adeno-associated virus 3B
tggccactccctctatgcgcactcgctcgctcggtggggcctggcgaccaaaggtcgccagacggacgtgctttgcacgtccggccccaccgagcgagcgagtgcgcatagagggagtggccaactccatcactagaggtatggcagtgacgtaacgcgaagcgcgcgaagcgagaccacgcctaccagctgcgtcagcagtcaggtgacccttttgcgacagtttgcgacaccacgtggccgctgagggtatatattctcgagtgagcgaaccaggagctccattttgaccgcgaaatttgaacgagcagcagccatgccggggttctacgagattgtcctgaaggtcccgagtgacctggacgagcacctgccgggcatttctaactcgtttgttaactgggtggccgagaaggaatgggagctgccgccggattctgacatggatccgaatctgattgagcaggcacccctgaccgtggccgaaaagcttcagcgcgagttcctggtggagtggcgccgcgtgagtaaggccccggaggccctcttttttgtccagttcgaaaagggggagacctacttccacctgcacgtgctgattgagaccatcggggtcaaatccatggtggtcggccgctacgtgagccagattaaagagaagctggtgacccgcatctaccgcggggtcgagccgcagcttccgaactggttcgcggtgaccaaaacgcgaaatggcgccgggggcgggaacaaggtggtggacgactgctacatccccaactacctgctccccaagacccagcccgagctccagtgggcgtggactaacatggaccagtatttaagcgcctgtttgaatctcgcggagcgtaaacggctggtggcgcagcatctgacgcacgtgtcgcagacgcaggagcagaacaaagagaatcagaaccccaattctgacgcgccggtcatcaggtcaaaaacctcagccaggtacatggagctggtcgggtggctggtggaccgcgggatcacgtcagaaaagcaatggattcaggaggaccaggcctcgtacatctccttcaacgccgcctccaactcgcggtcccagatcaaggccgcgctggacaatgcctccaagatcatgagcctgacaaagacggctccggactacctggtgggcagcaacccgccggaggacattaccaaaaatcggatctaccaaatcctggagctgaacgggtacgatccgcagtacgcggcctccgtcttcctgggctgggcgcaaaagaagttcgggaagaggaacaccatctggctctttgggccggccacgacgggtaaaaccaacatcgcggaagccatcgcccacgccgtgcccttctacggctgcgtaaactggaccaatgagaactttcccttcaacgattgcgtcgacaagatggtgatctggtgggaggagggcaagatgacggccaaggtcgtggagagcgccaaggccattctgggcggaagcaaggtgcgcgtggaccaaaagtgcaagtcatcggcccagatcgaacccactcccgtgatcgtcacctccaacaccaacatgtgcgccgtgattgacgggaacagcaccaccttcgagcatcagcagccgctgcaggaccggatgtttaaatttgaacttacccgccgtttggaccatgactttgggaaggtcaccaaacaggaagtaaaggactttttccggtgggcttccgatcacgtgactgacgtggctcatgagttctacgtcagaaagggtggagctaagaaacgccccgcctccaatgacgcggatgtaagcgagccaaaacggcagtgcacgtcacttgcgcagccgacaacgtcagacgcggaagcaccggcggactacgcggacaggtaccaaaacaaatgttctcgtcacgtgggcatgaatctgatgctttttccctgtaaaacatgcgagagaatgaatcaaatttccaatgtctgttttacgcatggtcaaagagactgtggggaatgcttccctggaatgtcagaatctcaacccgtttctgtcgtcaaaaagaagacttatcagaaactgtgtccaattcatcatatcctgggaagggcacccgagattgcctgttcggcctgcgatttggccaatgtggacttggatgactgtgtttctgagcaataaatgacttaaaccaggtatggctgctgacggttatcttccagattggctcgaggacaacctttctgaaggcattcgtgagtggtgggctctgaaacctggagtccctcaacccaaagcgaaccaacaacaccaggacaaccgtcggggtcttgtgcttccgggttacaaatacctcggacccggtaacggactcgacaaaggagagccggtcaacgaggcggacgcggcagccctcgaacacgacaaagcttacgaccagcagctcaaggccggtgacaacccgtacctcaagtacaaccacgccgacgccgagtttcaggagcgtcttcaagaagatacgtcttttgggggcaaccttggcagagcagtcttccaggccaaaaagaggatccttgagcctcttggtctggttgaggaagcagctaaaacggctcctggaaagaagaggcctgtagatcagtctcctcaggaaccggactcatcatctggtgttggcaaatcgggcaaacagcctgccagaaaaagactaaatttcggtcagactggcgactcagagtcagtcccagaccctcaacctctcggagaaccaccagcagcccccacaagtttgggatctaatacaatggcttcaggcggtggcgcaccaatggcagacaataacgagggtgccgatggagtgggtaattcctcaggaaattggcattgcgattcccaatggctgggcgacagagtcatcaccaccagcaccagaacctgggccctgcccacttacaacaaccatctctacaagcaaatctccagccaatcaggagcttcaaacgacaaccactactttggctacagcaccccttgggggtattttgactttaacagattccactgccacttctcaccacgtgactggcagcgactcattaacaacaactggggattccggcccaagaaactcagcttcaagctcttcaacatccaagttaaagaggtcacgcagaacgatggcacgacgactattgccaataaccttaccagcacggttcaagtgtttacggactcggagtatcagctcccgtacgtgctcgggtcggcgcaccaaggctgtctcccgccgtttccagcggacgtcttcatggtccctcagtatggatacctcaccctgaacaacggaagtcaagcggtgggacgctcatccttttactgcctggagtacttcccttcgcagatgctaaggactggaaataacttccaattcagctataccttcgaggatgtaccttttcacagcagctacgctcacagccagagtttggatcgcttgatgaatcctcttattgatcagtatctgtactacctgaacagaacgcaaggaacaacctctggaacaaccaaccaatcacggctgctttttagccaggctgggcctcagtctatgtctttgcaggccagaaattggctacctgggccctgctaccggcaacagagactttcaaagactgctaacgacaacaacaacagtaactttccttggacagcggccagcaaatatcatctcaatggccgcgactcgctggtgaatccaggaccagctatggccagtcacaaggacgatgaagaaaaatttttccctatgcacggcaatctaatatttggcaaagaagggacaacggcaagtaacgcagaattagataatgtaatgattacggatgaagaagagattcgtaccaccaatcctgtggcaacagagcagtatggaactgtggcaaataacttgcagagctcaaatacagctcccacgactagaactgtcaatgatcagggggccttacctggcatggtgtggcaagatcgtgacgtgtaccttcaaggacctatctgggcaaagattcctcacacggatggacactttcatccttctcctctgatgggaggctttggactgaaacatccgcctcctcaaatcatgatcaaaaatactccggtaccggcaaatcctccgacgactttcagcccggccaagtttgcttcatttatcactcagtactccactggacaggtcagcgtggaaattgagtgggagctacagaaagaaaacagcaaacgttggaatccagagattcagtacacttccaactacaacaagtctgttaatgtggactttactgtagacactaatggtgtttatagtgaacctcgccctattggaacccggtatctcacacgaaacttgtaatcctggttaatcaataaaccgtttaattcgtttcagttgaactttggctcttgtgcacttcttatcttatcttgtttccatggctactgcgtagataagcagcggcctgcggcgcttgcgcttcgcggtttacaactgctggttaatatttaactctcgccatacctctagtgatggagttggccactccctctatgcgcactcgctcgctcggtggggccggacgtgcaaagcacgtccgtctggcgacctttggtcgccaggccccaccgagcgagcgagtgcgcatagagggagtggccaa

SEQ ID NO: 5130 - DNA, 1800 bp, Adeno-associated virus 4
  modified_base (342)..(342): a, c, t or g
acggctcctggaaagaagagaccgttgattgaatccccccagcagcccgactcctccacgggtatcggcaaaaaaggcaagcagccggctaaaaagaagctcgttttcgaagacgaaactggagcaggcgacggaccccctgagggatcaacttccggagccatgtctgatgacagtgagatgcgtgcagcagctggcggagctgcagtcgagggsggacaaggtgccgatggagtgggtaatgcctcgggtgattggcattgcgattccacctggtctgagggccacgtcacgaccaccagcaccagaacctgggtcttgcccacctacaacaaccacctntacaagcgactcggagagagcctgcagtccaacacctacaacggattctccaccccctggggatactttgacttcaaccgcttccactgccacttctcaccacgtgactggcagcgactcatcaacaacaactggggcatgcgacccaaagccatgcgggtcaaaatcttcaacatccaggtcaaggaggtcacgacgtcgaacggcgagacaacggtggctaataaccttaccagcacggttcagatctttgcggactcgtcgtacgaactgccgtacgtgatggatgcgggtcaagagggcagcctgcctccttttcccaacgacgtctttatggtgccccagtacggctactgtggactggtgaccggcaacacttcgcagcaacagactgacagaaatgccttctactgcctggagtactttccttcgcagatgctgcggactggcaacaactttgaaattacgtacagttttgagaaggtgcctttccactcgatgtacgcgcacagccagagcctggaccggctgatgaaccctctcatcgaccagtacctgtggggactgcaatcgaccaccaccggaaccaccctgaatgccgggactgccaccaccaactttaccaagctgcggcctaccaacttttccaactttaaaaagaactggctgcccgggccttcaatcaagcagcagggcttctcaaagactgccaatcaaaactacaagatccctgccaccgggtcagacagtctcatcaaatacgagacgcacagcactctggacggaagatggagtgccctgacccccggacctccaatggccacggctggacctgcggacagcaagttcagcaacagccagctcatctttgcggggcctaaacagaacggcaacacggccaccgtacccgggactctgatcttcacctctgaggaggagctggcagccaccaacgccaccgatacggacatgtggggcaacctacctggcggtgaccagagcaacagcaacctgccgaccgtggacagactgacagccttgggagccgtgcctggaatggtctggcaaaacagagacatttactaccagggtcccatttgggccaagattcctcataccgatggacactttcacccctcaccgctgattggtgggtttgggctgaaacacccgcctcctcaaatttttatcaagaacaccccggtacctgcgaatcctgcaacgaccttcagctctactccggtaaactccttcattactcagtacagcactggccaggtgtcggtgcagattgactgggagatccagaaggagcggtccaaacgctggaaccccgaggtccagtttacctccaactacggacagcaaaactctctgttgtgggctcccgatgcggctgggaaatacactgagcctagggctatcggtacccgctacctcacccaccacctgtaataa

SEQ ID NO: 5131 - DNA, 2208 bp, Adeno-associated virus 4
  modified_base (750)..(750): a, c, t or g
atgactgacggttaccttccagattggctagaggacaacctctctgaaggcgttcgagagtggtgggcgctgcaacctggagcccctaaacccaaggcaaatcaacaacatcaggacaacgctcggggtcttgtgcttccgggttacaaatacctcggacccggcaacggactcgacaagggggaacccgtcaacgcagcggacgcggcagccctcgagcacgacaaggcctacgaccagcagctcaaggccggtgacaacccctacctcaagtacaaccacgccgacgcggagttccagcagcggcttcagggcgacacatcgtttgggggcaacctcggcagagcagtcttccaggccaaaaagagggttcttgaacctcttggtctggttgagcaagcgggtgagacggctcctggaaagaagagaccgttgattgaatccccccagcagcccgactcctccacgggtatcggcaaaaaaggcaagcagccggctaaaaagaagctcgttttcgaagacgaaactggagcaggcgacggaccccctgagggatcaacttccggagccatgtctgatgacagtgagatgcgtgcagcagctggcggagctgcagtcgagggsggacaaggtgccgatggagtgggtaatgcctcgggtgattggcattgcgattccacctggtctgagggccacgtcacgaccaccagcaccagaacctgggtcttgcccacctacaacaaccacctntacaagcgactcggagagagcctgcagtccaacacctacaacggattctccaccccctggggatactttgacttcaaccgcttccactgccacttctcaccacgtgactggcagcgactcatcaacaacaactggggcatgcgacccaaagccatgcgggtcaaaatcttcaacatccaggtcaaggaggtcacgacgtcgaacggcgagacaacggtggctaataaccttaccagcacggttcagatctttgcggactcgtcgtacgaactgccgtacgtgatggatgcgggtcaagagggcagcctgcctccttttcccaacgacgtctttatggtgccccagtacggctactgtggactggtgaccggcaacacttcgcagcaacagactgacagaaatgccttctactgcctggagtactttccttcgcagatgctgcggactggcaacaactttgaaattacgtacagttttgagaaggtgcctttccactcgatgtacgcgcacagccagagcctggaccggctgatgaaccctctcatcgaccagtacctgtggggactgcaatcgaccaccaccggaaccaccctgaatgccgggactgccaccaccaactttaccaagctgcggcctaccaacttttccaactttaaaaagaactggctgcccgggccttcaatcaagcagcagggcttctcaaagactgccaatcaaaactacaagatccctgccaccgggtcagacagtctcatcaaatacgagacgcacagcactctggacggaagatggagtgccctgacccccggacctccaatggccacggctggacctgcggacagcaagttcagcaacagccagctcatctttgcggggcctaaacagaacggcaacacggccaccgtacccgggactctgatcttcacctctgaggaggagctggcagccaccaacgccaccgatacggacatgtggggcaacctacctggcggtgaccagagcaacagcaacctgccgaccgtggacagactgacagccttgggagccgtgcctggaatggtctggcaaaacagagacatttactaccagggtcccatttgggccaagattcctcataccgatggacactttcacccctcaccgctgattggtgggtttgggctgaaacacccgcctcctcaaatttttatcaagaacaccccggtacctgcgaatcctgcaacgaccttcagctctactccggtaaactccttcattactcagtacagcactggccaggtgtcggtgcagattgactgggagatccagaaggagcggtccaaacgctggaaccccgaggtccagtttacctccaactacggacagcaaaactctctgttgtgggctcccgatgcggctgggaaatacactgagcctagggctatcggtacccgctacctcacccaccacctgtaataa

SEQ ID NO: 5132 - DNA, 1872 bp, Adeno-associated virus 4
atgccggggttctacgagatcgtgctgaaggtgcccagcgacctggacgagcacctgcccggcatttctgactcttttgtgagctgggtggccgagaaggaatgggagctgccgccggattctgacatggacttgaatctgattgagcaggcacccctgaccgtggccgaaaagctgcaacgcgagttcctggtcgagtggcgccgcgtgagtaaggccccggaggccctcttctttgtccagttcgagaagggggacagctacttccacctgcacatcctggtggagaccgtgggcgtcaaatccatggtggtgggccgctacgtgagccagattaaagagaagctggtgacccgcatctaccgcggggtcgagccgcagcttccgaactggttcgcggtgaccaagacgcgtaatggcgccggaggcgggaacaaggtggtggacgactgctacatccccaactacctgctccccaagacccagcccgagctccagtgggcgtggactaacatggaccagtatataagcgcctgtttgaatctcgcggagcgtaaacggctggtggcgcagcatctgacgcacgtgtcgcagacgcaggagcagaacaaggaaaaccagaaccccaattctgacgcgccggtcatcaggtcaaaaacctccgccaggtacatggagctggtcgggtggctggtggaccgcgggatcacgtcagaaaagcaatggatccaggaggaccaggcgtcctacatctccttcaacgccgcctccaactcgcggtcacaaatcaaggccgcgctggacaatgcctccaaaatcatgagcctgacaaagacggctccggactacctggtgggccagaacccgccggaggacatttccagcaaccgcatctaccgaatcctcgagatgaacgggtacgatccgcagtacgcggcctccgtcttcctgggctgggcgcaaaagaagttcgggaagaggaacaccatctggctctttgggccggccacgacgggtaaaaccaacatcgcggaagccatcgcccacgccgtgcccttctacggctgcgtgaactggaccaatgagaactttccgttcaacgattgcgtcgacaagatggtgatctggtgggaggagggcaagatgacggccaaggtcgtagagagcgccaaggccatcctgggcggaagcaaggtgcgcgtggaccaaaagtgcaagtcatcggcccagatcgacccaactcccgtgatcgtcacctccaacaccaacatgtgcgcggtcatcgacggaaactcgaccaccttcgagcaccaacaaccactccaggaccggatgttcaagttcgagctcaccaagcgcctggagcacgactttggcaaggtcaccaagcaggaagtcaaagactttttccggtgggcgtcagatcacgtgaccgaggtgactcacgagttttacgtcagaaagggtggagctagaaagaggcccgcccccaatgacgcagatataagtgagcccaagcgggcctgtccgtcagttgcgcagccatcgacgtcagacgcggaagctccggtggactacgcggacaggtaccaaaacaaatgttctcgtcacgtgggtatgaatctgatgctttttccctgccggcaatgcgagagaatgaatcagaatgtggacatttgcttcacgcacggggtcatggactgtgccgagtgcttccccgtgtcagaatctcaacccgtgtctgtcgtcagaaagcggacgtatcagaaactgtgtccgattcatcacatcatggggagggcgcccgaggtggcctgctcggcctgcgaactggccaatgtggacttggatgactgtgacatggaacaataa

SEQ ID NO: 5133 - DNA, 1611 bp, Adeno-associated virus 4
atgccggggttctacgagatcgtgctgaaggtgcccagcgacctggacgagcacctgcccggcatttctgactcttttgtgagctgggtggccgagaaggaatgggagctgccgccggattctgacatggacttgaatctgattgagcaggcacccctgaccgtggccgaaaagctgcaacgcgagttcctggtcgagtggcgccgcgtgagtaaggccccggaggccctcttctttgtccagttcgagaagggggacagctacttccacctgcacatcctggtggagaccgtgggcgtcaaatccatggtggtgggccgctacgtgagccagattaaagagaagctggtgacccgcatctaccgcggggtcgagccgcagcttccgaactggttcgcggtgaccaagacgcgtaatggcgccggaggcgggaacaaggtggtggacgactgctacatccccaactacctgctccccaagacccagcccgagctccagtgggcgtggactaacatggaccagtatataagcgcctgtttgaatctcgcggagcgtaaacggctggtggcgcagcatctgacgcacgtgtcgcagacgcaggagcagaacaaggaaaaccagaaccccaattctgacgcgccggtcatcaggtcaaaaacctccgccaggtacatggagctggtcgggtggctggtggaccgcgggatcacgtcagaaaagcaatggatccaggaggaccaggcgtcctacatctccttcaacgccgcctccaactcgcggtcacaaatcaaggccgcgctggacaatgcctccaaaatcatgagcctgacaaagacggctccggactacctggtgggccagaacccgccggaggacatttccagcaaccgcatctaccgaatcctcgagatgaacgggtacgatccgcagtacgcggcctccgtcttcctgggctgggcgcaaaagaagttcgggaagaggaacaccatctggctctttgggccggccacgacgggtaaaaccaacatcgcggaagccatcgcccacgccgtgcccttctacggctgcgtgaactggaccaatgagaactttccgttcaacgattgcgtcgacaagatggtgatctggtgggaggagggcaagatgacggccaaggtcgtagagagcgccaaggccatcctgggcggaagcaaggtgcgcgtggaccaaaagtgcaagtcatcggcccagatcgacccaactcccgtgatcgtcacctccaacaccaacatgtgcgcggtcatcgacggaaactcgaccaccttcgagcaccaacaaccactccaggaccggatgttcaagttcgagctcaccaagcgcctggagcacgactttggcaaggtcaccaagcaggaagtcaaagactttttccggtgggcgtcagatcacgtgaccgaggtgactcacgagttttacgtcagaaagggtggagctagaaagaggcccgcccccaatgacgcagatataagtgagcccaagcgggcctgtccgtcagttgcgcagccatcgacgtcagacgcggaagctccggtggactacgcggacagattggctagaggacaacctctctga

SEQ ID NO: 5134 - DNA, 1872 bp, Adeno-associated virus 4; identical to SEQ ID NO: 5132

SEQ ID NO: 5135 - DNA, 1617 bp, Adeno-associated virus 4
  modified_base (162)..(162): a, c, t or g
atgcgtgcagcagctggcggagctgcagtcgagggsggacaaggtgccgatggagtgggtaatgcctcgggtgattggcattgcgattccacctggtctgagggccacgtcacgaccaccagcaccagaacctgggtcttgcccacctacaacaaccacctntacaagcgactcggagagagcctgcagtccaacacctacaacggattctccaccccctggggatactttgacttcaaccgcttccactgccacttctcaccacgtgactggcagcgactcatcaacaacaactggggcatgcgacccaaagccatgcgggtcaaaatcttcaacatccaggtcaaggaggtcacgacgtcgaacggcgagacaacggtggctaataaccttaccagcacggttcagatctttgcggactcgtcgtacgaactgccgtacgtgatggatgcgggtcaagagggcagcctgcctccttttcccaacgacgtctttatggtgccccagtacggctactgtggactggtgaccggcaacacttcgcagcaacagactgacagaaatgccttctactgcctggagtactttccttcgcagatgctgcggactggcaacaactttgaaattacgtacagttttgagaaggtgcctttccactcgatgtacgcgcacagccagagcctggaccggctgatgaaccctctcatcgaccagtacctgtggggactgcaatcgaccaccaccggaaccaccctgaatgccgggactgccaccaccaactttaccaagctgcggcctaccaacttttccaactttaaaaagaactggctgcccgggccttcaatcaagcagcagggcttctcaaagactgccaatcaaaactacaagatccctgccaccgggtcagacagtctcatcaaatacgagacgcacagcactctggacggaagatggagtgccctgacccccggacctccaatggccacggctggacctgcggacagcaagttcagcaacagccagctcatctttgcggggcctaaacagaacggcaacacggccaccgtacccgggactctgatcttcacctctgaggaggagctggcagccaccaacgccaccgatacggacatgtggggcaacctacctggcggtgaccagagcaacagcaacctgccgaccgtggacagactgacagccttgggagccgtgcctggaatggtctggcaaaacagagacatttactaccagggtcccatttgggccaagattcctcataccgatggacactttcacccctcaccgctgattggtgggtttgggctgaaacacccgcctcctcaaatttttatcaagaacaccccggtacctgcgaatcctgcaacgaccttcagctctactccggtaaactccttcattactcagtacagcactggccaggtgtcggtgcagattgactgggagatccagaaggagcggtccaaacgctggaaccccgaggtccagtttacctccaactacggacagcaaaactctctgttgtgggctcccgatgcggctgggaaatacactgagcctagggctatcggtacccgctacctcacccaccacctgtaa

SEQ ID NO: 5136 - DNA, 939 bp, Adeno-associated virus 4
atggagctggtcgggtggctggtggaccgcgggatcacgtcagaaaagcaatggatccaggaggaccaggcgtcctacatctccttcaacgccgcctccaactcgcggtcacaaatcaaggccgcgctggacaatgcctccaaaatcatgagcctgacaaagacggctccggactacctggtgggccagaacccgccggaggacatttccagcaaccgcatctaccgaatcctcgagatgaacgggtacgatccgcagtacgcggcctccgtcttcctgggctgggcgcaaaagaagttcgggaagaggaacaccatctggctctttgggccggccacgacgggtaaaaccaacatcgcggaagccatcgcccacgccgtgcccttctacggctgcgtgaactggaccaatgagaactttccgttcaacgattgcgtcgacaagatggtgatctggtgggaggagggcaagatgacggccaaggtcgtagagagcgccaaggccatcctgggcggaagcaaggtgcgcgtggaccaaaagtgcaagtcatcggcccagatcgacccaactcccgtgatcgtcacctccaacaccaacatgtgcgcggtcatcgacggaaactcgaccaccttcgagcaccaacaaccactccaggaccggatgttcaagttcgagctcaccaagcgcctggagcacgactttggcaaggtcaccaagcaggaagtcaaagactttttccggtgggcgtcagatcacgtgaccgaggtgactcacgagttttacgtcagaaagggtggagctagaaagaggcccgcccccaatgacgcagatataagtgagcccaagcgggcctgtccgtcagttgcgcagccatcgacgtcagacgcggaagctccggtggactacgcggacagattggctagaggacaacctctctga

SEQ ID NO: 5137 - DNA, 1197 bp, Adeno-associated virus 4
atggagctggtcgggtggctggtggaccgcgggatcacgtcagaaaagcaatggatccaggaggaccaggcgtcctacatctccttcaacgccgcctccaactcgcggtcacaaatcaaggccgcgctggacaatgcctccaaaatcatgagcctgacaaagacggctccggactacctggtgggccagaacccgccggaggacatttccagcaaccgcatctaccgaatcctcgagatgaacgggtacgatccgcagtacgcggcctccgtcttcctgggctgggcgcaaaagaagttcgggaagaggaacaccatctggctctttgggccggccacgacgggtaaaaccaacatcgcggaagccatcgcccacgccgtgcccttctacggctgcgtgaactggaccaatgagaactttccgttcaacgattgcgtcgacaagatggtgatctggtgggaggagggcaagatgacggccaaggtcgtagagagcgccaaggccatcctgggcggaagcaaggtgcgcgtggaccaaaagtgcaagtcatcggcccagatcgacccaactcccgtgatcgtcacctccaacaccaacatgtgcgcggtcatcgacggaaactcgaccaccttcgagcaccaacaaccactccaggaccggatgttcaagttcgagctcaccaagcgcctggagcacgactttggcaaggtcaccaagcaggaagtcaaagactttttccggtgggcgtcagatcacgtgaccgaggtgactcacgagttttacgtcagaaagggtggagctagaaagaggcccgcccccaatgacgcagatataagtgagcccaagcgggcctgtccgtcagttgcgcagccatcgacgtcagacgcggaagctccggtggactacgcggacaggtaccaaaacaaatgttctcgtcacgtgggtatgaatctgatgctttttccctgccggcaatgcgagagaatgaatcagaatgtggacatttgcttcacgcacggggtcatggactgtgccgagtgcttccccgtgtcagaatctcaacccgtgtctgtcgtcagaaagcggacgtatcagaaactgtgtccgattcatcacatcatggggagggcgcccgaggtggcctgctcggcctgcgaactggccaatgtggacttggatgactgtgacatggaacaa

SEQ ID NO: 5138 - DNA, 245 bp, Adeno-associated virus 4
ctccatcatctaggtttgcccactgacgtcaatgtgacgtcctagggttagggaggtccctgtattagcagtcacgtgagtgtcgtatttcgcggagcgtagcggagcgcataccaagctgccacgtcacagccacgtggtccgtttgcgacagtttgcgacaccatgtggtcaggagggtatataaccgcgagtgagccagcgaggagctccattttgcccgcgaattttgaacgagcagcagc

SEQ ID NO: 5139 - protein, 313 aa, Adeno-associated virus 4
  MOD_RES (313)..(313): Any amino acid
MELVGWLVDRGITSEKQWIQEDQASYISFNAASNSRSQIKAALDNASKIMSLTKTAPDYLVGQNPPEDISSNRIYRILEMNGYDPQYAASVFLGWAQKKFGKRNTIWLFGPATTGKTNIAEAIAHAVPFYGCVNWTNENFPFNDCVDKMVIWWEEGKMTAKVVESAKAILGGSKVRVDQKCKSSAQIDPTPVIVTSNTNMCAVIDGNSTTFEHQQPLQDRMFKFELTKRLEHDFGKVTKQEVKDFFRWASDHVTEVTHEFYVRKGGARKRPAPNDADISEPKRACPSVAQPSTSDAEAPVDYADRLARGQPLX

SEQ ID NO: 5140 - protein, 399 aa, Adeno-associated virus 4
MELVGWLVDRGITSEKQWIQEDQASYISFNAASNSRSQIKAALDNASKIMSLTKTAPDYLVGQNPPEDISSNRIYRILEMNGYDPQYAASVFLGWAQKKFGKRNTIWLFGPATTGKTNIAEAIAHAVPFYGCVNWTNENFPFNDCVDKMVIWWEEGKMTAKVVESAKAILGGSKVRVDQKCKSSAQIDPTPVIVTSNTNMCAVIDGNSTTFEHQQPLQDRMFKFELTKRLEHDFGKVTKQEVKDFFRWASDHVTEVTHEFYVRKGGARKRPAPNDADISEPKRACPSVAQPSTSDAEAPVDYADRYQNKCSRHVGMNLMLFPCRQCERMNQNVDICFTHGVMDCAECFPVSESQPVSVVRKRTYQKLCPIHHIMGRAPEVACSACELANVDLDDCDMEQ

SEQ ID NO: 5141 - protein, 623 aa, Adeno-associated virus 4
MPGFYEIVLKVPSDLDEHLPGISDSFVSWVAEKEWELPPDSDMDLNLIEQAPLTVAEKLQREFLVEWRRVSKAPEALFFVQFEKGDSYFHLHILVETVGVKSMVVGRYVSQIKEKLVTRIYRGVEPQLPNWFAVTKTRNGAGGGNKVVDDCYIPNYLLPKTQPELQWAWTNMDQYISACLNLAERKRLVAQHLTHVSQTQEQNKENQNPNSDAPVIRSKTSARYMELVGWLVDRGITSEKQWIQEDQASYISFNAASNSRSQIKAALDNASKIMSLTKTAPDYLVGQNPPEDISSNRIYRILEMNGYDPQYAASVFLGWAQKKFGKRNTIWLFGPATTGKTNIAEAIAHAVPFYGCVNWTNENFPFNDCVDKMVIWWEEGKMTAKVVESAKAILGGSKVRVDQKCKSSAQIDPTPVIVTSNTNMCAVIDGNSTTFEHQQPLQDRMFKFELTKRLEHDFGKVTKQEVKDFFRWASDHVTEVTHEFYVRKGGARKRPAPNDADISEPKRACPSVAQPSTSDAEAPVDYADRYQNKCSRHVGMNLMLFPCRQCERMNQNVDICFTHGVMDCAECFPVSESQPVSVVRKRTYQKLCPIHHIMGRAPEVACSACELANVDLDDCDMEQ

SEQ ID NO: 5142 - protein, 537 aa, Adeno-associated virus 4
  MOD_RES (537)..(537): Any amino acid
MPGFYEIVLKVPSDLDEHLPGISDSFVSWVAEKEWELPPDSDMDLNLIEQAPLTVAEKLQREFLVEWRRVSKAPEALFFVQFEKGDSYFHLHILVETVGVKSMVVGRYVSQIKEKLVTRIYRGVEPQLPNWFAVTKTRNGAGGGNKVVDDCYIPNYLLPKTQPELQWAWTNMDQYISACLNLAERKRLVAQHLTHVSQTQEQNKENQNPNSDAPVIRSKTSARYMELVGWLVDRGITSEKQWIQEDQASYISFNAASNSRSQIKAALDNASKIMSLTKTAPDYLVGQNPPEDISSNRIYRILEMNGYDPQYAASVFLGWAQKKFGKRNTIWLFGPATTGKTNIAEAIAHAVPFYGCVNWTNENFPFNDCVDKMVIWWEEGKMTAKVVESAKAILGGSKVRVDQKCKSSAQIDPTPVIVTSNTNMCAVIDGNSTTFEHQQPLQDRMFKFELTKRLEHDFGKVTKQEVKDFFRWASDHVTEVTHEFYVRKGGARKRPAPNDADISEPKRACPSVAQPSTSDAEAPVDYADRLARGQPLX

SEQ ID NO: 5143 - protein, 623 aa, Adeno-associated virus 4; identical to SEQ ID NO: 5141

SEQ ID NO: 5144 - protein, 544 aa, Adeno-associated virus 4
MSDDSEMRAAAGGAAVEGGQGADGVGNASGDWHCDSTWSEGHVTTTSTRTWVLPTYNNHLYKRLGESLQSNTYNGFSTPWGYFDFNRFHCHFSPRDWQRLINNNWGMRPKAMRVKIFNIQVKEVTTSNGETTVANNLTSTVQIFADSSYELPYVMDAGQEGSLPPFPNDVFMVPQYGYCGLVTGNTSQQQTDRNAFYCLEYFPSQMLRTGNNFEITYSFEKVPFHSMYAHSQSLDRLMNPLIDQYLWGLQSTTTGTTLNAGTATTNFTKLRPTNFSNFKKNWLPGPSIKQQGFSKTANQNYKIPATGSDSLIKYETHSTLDGRWSALTPGPPMATAGPADSKFSNSQLIFAGPKQNGNTATVPGTLIFTSEEELAATNATDTDMWGNLPGGDQSNSNLPTVDRLTALGAVPGMVWQNRDIYYQGPIWAKIPHTDGHFHPSPLIGGFGLKHPPPQIFIKNTPVPANPATTFSSTPVNSFITQYSTGQVSVQIDWEIQKERSKRWNPEVQFTSNYGQQNSLLWAPDAAGKYTEPRAIGTRYLTHHL

SEQ ID NO: 5145 - protein, 734 aa, Adeno-associated virus 4; identical to SEQ ID NO: 4791

SEQ ID NO: 5146 - protein, 598 aa, Adeno-associated virus 4
TAPGKKRPLIESPQQPDSSTGIGKKGKQPAKKKLVFEDETGAGDGPPEGSTSGAMSDDSEMRAAAGGAAVEGGQGADGVGNASGDWHCDSTWSEGHVTTTSTRTWVLPTYNNHLYKRLGESLQSNTYNGFSTPWGYFDFNRFHCHFSPRDWQRLINNNWGMRPKAMRVKIFNIQVKEVTTSNGETTVANNLTSTVQIFADSSYELPYVMDAGQEGSLPPFPNDVFMVPQYGYCGLVTGNTSQQQTDRNAFYCLEYFPSQMLRTGNNFEITYSFEKVPFHSMYAHSQSLDRLMNPLIDQYLWGLQSTTTGTTLNAGTATTNFTKLRPTNFSNFKKNWLPGPSIKQQGFSKTANQNYKIPATGSDSLIKYETHSTLDGRWSALTPGPPMATAGPADSKFSNSQLIFAGPKQNGNTATVPGTLIFTSEEELAATNATDTDMWGNLPGGDQSNSNLPTVDRLTALGAVPGMVWQNRDIYYQGPIWAKIPHTDGHFHPSPLIGGFGLKHPPPQIFIKNTPVPANPATTFSSTPVNSFITQYSTGQVSVQIDWEIQKERSKRWNPEVQFTSNYGQQNSLLWAPDAAGKYTEPRAIGTRYLTHHL

SEQ ID NO: 5147 - DNA, 129 bp, Adeno-associated virus 4
ttggccactccctctatgcgcgctcgctcactcactcggccctgcggccagaggccggcagtctggagacctttggtgtccagggcagggccgagtgagtgagcgagcgcgcatagagggagtggccaa

SEQ ID NO: 5148 - DNA, 125 bp, Adeno-associated virus 4
ttggccactccctctatgcgcgctcgctcactcactcggccctggagaccaaaggtctccagactgccggcctctggccggcagggccgagtgagtgagcgagcgcgcatagagggagtggccaa

SEQ ID NO: 5149 - DNA, 4768 bp, Adeno-associated virus 4
  modified_base (3009)..(3009): a, c, t or g
ttggccactccctctatgcgcgctcgctcactcactcggccctggagaccaaaggtctccagactgccggcctctggccggcagggccgagtgagtgagcgagcgcgcatagagggagtggccaactccatcatctaggtttgcccactgacgtcaatgtgacgtcctagggttagggaggtccctgtattagcagtcacgtgagtgtcgtatttcgcggagcgtagcggagcgcataccaagctgccacgtcacagccacgtggtccgtttgcgacagtttgcgacaccatgtggtcaggagggtatataaccgcgagtgagccagcgaggagctccattttgcccgcgaattttgaacgagcagcagccatgccggggttctacgagatcgtgctgaaggtgcccagcgacctggacgagcacctgcccggcatttctgactcttttgtgagctgggtggccgagaaggaatgggagctgccgccggattctgacatggacttgaatctgattgagcaggcacccctgaccgtggccgaaaagctgcaacgcgagttcctggtcgagtggcgccgcgtgagtaaggccccggaggccctcttctttgtccagttcgagaagggggacagctacttccacctgcacatcctggtggagaccgtgggcgtcaaatccatggtggtgggccgctacgtgagccagattaaagagaagctggtgacccgcatctaccgcggggtcgagccgcagcttccgaactggttcgcggtgaccaagacgcgtaatggcgccggaggcgggaacaaggtggtggacgactgctacatccccaactacctgctccccaagacccagcccgagctccagtgggcgtggactaacatggaccagtatataagcgcctgtttgaatctcgcggagcgtaaacggctggtggcgcagcatctgacgcacgtgtcgcagacgcaggagcagaacaaggaaaaccagaaccccaattctgacgcgccggtcatcaggtcaaaaacctccgccaggtacatggagctggtcgggtggctggtggaccgcgggatcacgtcagaaaagcaatggatccaggaggaccaggcgtcctacatctccttcaacgccgcctccaactcgcggtcacaaatcaaggccgcgctggacaatgcctccaaaatcatgagcctgacaaagacggctccggactacctggtgggccagaacccgccggaggacatttccagcaaccgcatctaccgaatcctcgagatgaacgggtacgatccgcagtacgcggcctccgtcttcctgggctgggcgcaaaagaagttcgggaagaggaacaccatctggctctttgggccggccacgacgggtaaaaccaacatcgcggaagccatcgcccacgccgtgcccttctacggctgcgtgaactggaccaatgagaactttccgttcaacgattgcgtcgacaagatggtgatctggtgggaggagggcaagatgacggccaaggtcgtagagagcgccaaggccatcctgggcggaagcaaggtgcgcgtggaccaaaagtgcaagtcatcggcccagatcgacccaactcccgtgatcgtcacctccaacaccaacatgtgcgcggtcatcgacggaaactcgaccaccttcgagcaccaacaaccactccaggaccggatgttcaagttcgagctcaccaagcgcctggagcacgactttggcaaggtcaccaagcaggaagtcaaagactttttccggtgggcgtcagatcacgtgaccgaggtgactcacgagttttacgtcagaaagggtggagctagaaagaggcccgcccccaatgacgcagatataagtgagcccaagcgggcctgtccgtcagttgcgcagccatcgacgtcagacgcggaagctccggtggactacgcggacaggtaccaaaacaaatgttctcgtcacgtgggtatgaatctgatgctttttccctgccggcaatgcgagagaatgaatcagaatgtggacatttgcttcacgcacggggtcatggactgtgccgagtgcttccccgtgtcagaatctcaacccgtgtctgtcgtcagaaagcggacgtatcagaaactgtgtccgattcatcacatcatggggagggcgcccgaggtggcctgctcggcctgcgaactggccaatgtggacttggatgactgtgacatggaacaataaatgactcaaaccagatatgactgacggttaccttccagattggctagaggacaacctctctgaaggcgttcgagagtggtgggcgctgcaacctggagcccctaaacccaaggcaaatcaacaacatcaggacaacgctcggggtcttgtgcttccgggttacaaatacctcggacccggcaacggactcgacaagggggaacccgtcaacgcagcggacgcggcagccctcgagcacgacaaggcctacgaccagcagctcaaggccggtgacaacccctacctcaagtacaaccacgccgacgcggagttccagcagcggcttcagggcgacacaccgtttgggggcaacctcggcagagcagtcttccaggccaaaaagagggttcttgaacctcttggtctggttgagcaagcgggtgagacggctcctggaaagaagagaccgttgattgaatccccccagcagcccgactcctccacgggtatcggcaaaaaaggcaagcagccggctaaaaagaagctcgttttcgaagacgaaactggagcaggcgacggaccccctgagggatcaacttccggagccatgtctgatgacagtgagatgcgtgcagcagctggcggagctgcagtcgagggsggacaaggtgccgatggagtgggtaatgcctcgggtgattggcattgcgattccacctggtctgagggccacgtcacgaccaccagcaccagaacctgggtcttgcccacctacaacaaccacctntacaagcgactcggagagagcctgcagtccaacacctacaacggattctccaccccctggggatactttgacttcaaccgcttccactgccacttctcaccacgtgactggcagcgactcatcaacaacaactggggcatgcgacccaaagccatgcgggtcaaaatcttcaacatccaggtcaaggaggtcacgacgtcgaacggcgagacaacggtggctaataaccttaccagcacggttcagatctttgcggactcgtcgtacgaactgccgtacgtgatggatgcgggtcaagagggcagcctgcctccttttcccaacgacgtctttatggtgccccagtacggctactgtggactggtgaccggcaacacttcgcagcaacagactgacagaaatgccttctactgcctggagtactttccttcgcagatgctgcggactggcaacaactttgaaattacgtacagttttgagaaggtgcctttccactcgatgtacgcgcacagccagagcctggaccggctgatgaaccctctcatcgaccagtacctgtggggactgcaatcgaccaccaccggaaccaccctgaatgccgggactgccaccaccaactttaccaagctgcggcctaccaacttttccaactttaaaaagaactggctgcccgggccttcaatcaagcagcagggcttctcaaagactgccaatcaaaactacaagatccctgccaccgggtcagacagtctcatcaaatacgagacgcacagcactctggacggaagatggagtgccctgacccccggacctccaatggccacggctggacctgcggacagcaagttcagcaacagccagctcatctttgcggggcctaaacagaacggcaacacggccaccgtacccgggactctgatcttcacctctgaggaggagctggcagccaccaacgccaccgatacggacatgtggggcaacctacctggcggtgaccagagcaacagcaacctgccgaccgtggacagactgacagccttgggagccgtgcctggaatggtctggcaaaacagagacatttactaccagggtcccatttgggccaagattcctcataccgatggacactttcacccctcaccgctgattggtgggtttgggctgaaacacccgcctcctcaaatttttatcaagaacaccccggtacctgcgaatcctgcaacgaccttcagctctactccggtaaactccttcattactcagtacagcactggccaggtgtcggtgcagattgactgggagatccagaaggagcggtccaaacgctggaaccccgaggtccagtttacctccaactacggacagcaaaactctctgttgtgggctcccgatgcggctgggaaatacactgagcctagggctatcggtacccgctacctcacccaccacctgtaataacctgttaatcaataaaccggtttattcgtttcagttgaactttggtctccgtgtccttcttatcttatctcgtttccatggctactgcgtacataagcagcggcctgcggcgcttgcgcttcgcggtttacaactgccggttaatcagtaacttctggcaaaccatgatgatggagttggccactccctctatgcgcgctcgctcactcactcggccctggagaccaaaggtctccagactgccggcctctggccggcagggccgagtgagtgagcgagcgcgcatagagggagtggccaa

SEQ ID NO: 5150 - protein, 725 aa, Adeno-associated virus 5
MAADGYLPDWLEDTLSEGIRQWWKLKPGPPPPKPAERHKDDSRGLVLPGYKYLGPFNGLDKGEPVNEADAAALEHDKAYDRQLDSGDNPYLKYNHADAEFQERLKEDTSFGGNLGRAVFQAKKRVLEPFGLVEEGAKTAPTGKRIDDHFPKRKKARTEEDSKPSTSSDAEAGPSGSQQLQIPAQPASSLGADTMSAGGGGPLGDNNQGADGVGNASGDWHCDSTWMGDRVVTKSTRTWVLPSYNNHQYREIKSGSVDGSNANAYFGYSTPWGYFDFNRFHSHWSPRDWQRLINNYWGFRPRSLRVKIFNIQVKEVTVQDSTTTIANNLTSTVQVFTDDDYQLPYVVGNGTEGCLPAFPPQVFTLPQYGYATLNRDNTENPTERSSFFCLEYFPSKMLRTGNNFEFTYNFEEVPFHSSFAPSQNLFKLANPLVDQYLYRFVSTNNTGGVQFNKNLAGRYANTYKNWFPGPMGRTQGWNLGSGVNRASVSAFATTNRMELEGASYQVPPQPNGMTNNLQGSNTYALENTMIFNSQPANPGTTATYLEGNMLITSESETQPVNRVAYNVGGQMATNNQSSTTAPTTGTYNLQEIVPGSVWMERDVYLQGPIWAKIPETGAHFHPSPAMGGFGLKHPPPMMLIKNTPVPGNITSFSDVPVSSFITQYSTGQVTVEMEWELKKENSKRWNPEIQYTNNYNDPQFVDFAPDSTGEYRTTRPIGTRYLTRPL

SEQ ID NO: 5151 - protein, 724 aa, Adeno-associated virus 5
MSFVDHPPDWLEEVGEGLREFLGLEAGPPKPKPNQQHQDQARGLVLPGYNYLGPGNGLDRGEPVNRADEVAREHDISYNEQLEAGDNPYLKYNHADAEFQEKLADDTSFGGNLGKAVFQAKKRVLEPFGLVEEGAKTAPTGKRIDDHFPKRKKARTEEDSKPSTSSDAEAGPSGSQQLQIPAQPASSLGADTMSAGGGGPLGDNNQGADGVGNASGDWHCDSTWMGDRVVTKSTRTWVLPSYNNHQYREIKSGSVDGSNANAYFGYSTPWGYFDFNRFHSHWSPRDWQRLINNYWGFRPRSLRVKIFNIQVKEVTVQDSTTTIANNLTSTVQVFTDDDYQLPYVVGNGTEGCLPAFPPQVFTLPQYGYATLNRDNTENPTERSSFFCLEYFPSKMLRTGNNFEFTYNFEEVPFHSSFAPSQNLFKLANPLVDQYLYRFVSTNNTGGVQFNKNLAGRYANTYKNWFPGPMGRTQGWNLGSGVNRASVSAFATTNRMELEGASYQVPPQPNGMTNNLQGSNTYALENTMIFNSQPANPGTTATYLEGNMLITSESETQPVNRVAYNVGGQMATNNQSSTTAPATGTYNLQEIVPGSVWMERDVYLQGPIWAKIPETGAHFHPSPAMGGFGLKHPPPMMLIKNTPVPGNITSFSDVPVSSFITQYSTGQVTVEMEWELKKENSKRWNPEIQYTNNYNDPQFVDFAPDSTGEYRTTRPIGTRYLTRPL

SEQ ID NO: 5152 - DNA, 2175 bp, Adeno-associated virus 5
atgtcttttgttgatcaccctccagattggttggaagaagttggtgaaggtcttcgcgagtttttgggccttgaagcgggcccaccgaaaccaaaacccaatcagcagcatcaagatcaagcccgtggtcttgtgctgcctggttataactatctcggacccggaaacggtctcgatcgaggagagcctgtcaacagggcagacgaggtcgcgcgagagcacgacatctcgtacaacgagcagcttgaggcgggagacaacccctacctcaagtacaaccacgcggacgccgagtttcaggagaagctcgccgacgacacatccttcgggggaaacctcggaaaggcagtctttcaggccaagaaaagggttctcgaaccttttggcctggttgaagagggtgctaagacggcccctaccggaaagcggatagacgaccactttccaaaaagaaagaaggctcggaccgaagaggactccaagccttccacctcgtcagacgccgaagctggacccagcggatcccagcagctgcaaatcccagcccaaccagcctcaagtttgggagctgatacaatgtctgcgggaggtggcggcccattgggcgacaataaccaaggtgccgatggagtgggcaatgcctcgggagattggcattgcgattccacgtggatgggggacagagtcgtcaccaagtccacccgaacctgggtgctgcccagctacaacaaccaccagtaccgagagatcaaaagcggctccgtcgacggaagcaacgccaacgcctactttggatacagcaccccctgggggtactttgactttaaccgcttccacagccactggagcccccgagactggcaaagactcatcaacaactactggggcttcagaccccggtccctcagagtcaaaatcttcaacattcaagtcaaagaggtcacggtgcaggactccaccaccaccatcgccaacaacctcacctccaccgtccaagtgtttacggacgacgactaccagctgccctacgtcgtcggcaacgggaccgagggatgcctgccggccttccctccgcaggtctttacgctgccgcagtacggttacgcgacgctgaaccgcgacaacacagaaaatcccaccgagaggagcagcttcttctgcctagagtactttcccagcaagatgctgagaacgggcaacaactttgagtttacctacaactttgaggaggtgcccttccactccagcttcgctcccagtcagaacctgttcaagctggccaacccgctggtggaccagtacttgtaccgcttcgtgagcacaaataacactggcggagtccagttcaacaagaacctggccgggagatacgccaacacctacaaaaactggttcccggggcccatgggccgaacccagggctggaacctgggctccggggtcaaccgcgccagtgtcagcgccttcgccacgaccaataggatggagctcgagggcgcgagttaccaggtgcccccgcagccgaacggcatgaccaacaacctccagggcagcaacacctatgccctggagaacactatgatcttcaacagccagccggcgaacccgggcaccaccgccacgtacctcgagggcaacatgctcatcaccagcgagagcgagacgcagccggtgaaccgcgtggcgtacaacgtcggcgggcagatggccaccaacaaccagagctccaccactgcccccgcgaccggcacgtacaacctccaggaaatcgtgcccggcagcgtgtggatggagagggacgtgtacctccaaggacccatctgggccaagatcccagagacgggggcgcactttcacccctctccggccatgggcggattcggactcaaacacccaccgcccatgatgctcatcaagaacacgcctgtgcccggaaatatcaccagcttctcggacgtgcccgtcagcagcttcatcacccagtacagcaccgggcaggtcaccgtggagatggagtgggagctcaagaaggaaaactccaagaggtggaacccagagatccagtacacaaacaactacaacgacccccagtttgtggactttgccccggacagcaccggggaatacagaaccaccagacctatcggaacccgataccttacccgacccctttaa

SEQ ID NO: 5153 - DNA, 2208 bp, Adeno-associated virus 6
atggctgccgatggttatcttccagattggctcgaggacaacctctctgagggcattcgcgagtggtgggacttgaaacctggagccccgaaacccaaagccaaccagcaaaagcaggacgacggccggggtctggtgcttcctggctacaagtacctcggacccttcaacggactcgacaagggggagcccgtcaacgcggcggatgcagcggccctcgagcacgacaaggcctacgaccagcagctcaaagcgggtgacaatccgtacctgcggtataaccacgccgacgccgagtttcaggagcgtctgcaagaagatacgtcttttgggggcaacctcgggcgagcagtcttccaggccaagaagagggttctcgaaccttttggtctggttgaggaaggtgctaagacggctcctggaaagaaacgtccggtagagcagtcgccacaagagccagactcctcctcgggcattggcaagacaggccagcagcccgctaaaaagagactcaattttggtcagactggcgactcagagtcagtccccgacccacaacctctcggagaacctccagcaacccccgctgctgtgggacctactacaatggcttcaggcggtggcgcaccaatggcagacaataacgaaggcgccgacggagtgggtaatgcctcaggaaattggcattgcgattccacatggctgggcgacagagtcatcaccaccagcacccgaacatgggccttgcccacctataacaaccacctctacaagcaaatctccagtgcttcaacgggggccagcaacgacaaccactacttcggctacagcaccccctgggggtattttgatttcaacagattccactgccatttctcaccacgtgactggcagcgactcatcaacaacaattggggattccggcccaagagactcaacttcaagctcttcaacatccaagtcaaggaggtcacgacgaatgatggcgtcacgaccatcgctaataaccttaccagcacggttcaagtcttctcggactcggagtaccagttgccgtacgtcctcggctctgcgcaccagggctgcctccctccgttcccggcggacgtgttcatgattccgcagtacggctacctaacgctcaacaatggcagccaggcagtgggacggtcatccttttactgcctggaatatttcccatcgcagatgctgagaacgggcaataactttaccttcagctacaccttcgaggacgtgcctttccacagcagctacgcgcacagccagagcctggaccggctgatgaatcctctcatcgaccagtacctgtattacctgaacagaactcagaatcagtccggaagtgcccaaaacaaggacttgctgtttagccgggggtctccagctggcatgtctgttcagcccaaaaactggctacctggaccctgttaccggcagcagcgcgtttctaaaacaaaaacagacaacaacaacagcaactttacctggactggtgcttcaaaatataaccttaatgggcgtgaatctataatcaaccctggcactgctatggcctcacacaaagacgacaaagacaagttctttcccatgagcggtgtcatgatttttggaaaggagagcgccggagcttcaaacactgcattggacaatgtcatgatcacagacgaagaggaaatcaaagccactaaccccgtggccaccgaaagatttgggactgtggcagtcaatctccagagcagcagcacagaccctgcgaccggagatgtgcatgttatgggagccttacctggaatggtgtggcaagacagagacgtatacctgcagggtcctatttgggccaaaattcctcacacggatggacactttcacccgtctcctctcatgggcggctttggacttaagcacccgcctcctcagatcctcatcaaaaacacgcctgttcctgcgaatcctccggcagagttttcggctacaaagtttgcttcattcatcacccagtattccacaggacaagtgagcgtggagattgaatgggagctgcagaaagaaaacagcaaacgctggaatcccgaagtgcagtatacatctaactatgcaaaatctgccaacgttgatttcactgtggacaacaatggactttatactgagcctcgccccattggcacccgttacctcacccgtcccctg

SEQ ID NO: 5154 - protein, 736 aa, Adeno-associated virus 6; identical to SEQ ID NO: 4799

SEQ ID NO: 5155 - protein, 623 aa, Adeno-associated virus 6
MPGFYEIVIKVPSDLDEHLPGISDSFVNWVAEKEWELPPDSDMDLNLIEQAPLTVAEKLQRDFLVQWRRVSKAPEALFFVQFEKGESYFHLHILVETTGVKSMVLGRFLSQIRDKLVQTIYRGIEPTLPNWFAVTKTRNGAGGGNKVVDECYIPNYLLPKTQPELQWAWTNMEEYISACLNLAERKRLVAHDLTHVSQTQEQNKENLNPNSDAPVIRSKTSARYMELVGWLVDRGITSEKQWIQEDQASYISFNAASNSRSQIKAALDNAGKIMALTKSAPDYLVGPAPPADIKTNRIYRILELNGYDPAYAGSVFLGWAQKRFGKRNTIWLFGPATTGKTNIAEAIAHAVPFYGCVNWTNENFPFNDCVDKMVIWWEEGKMTAKVVESAKAILGGSKVRVDQKCKSSAQIDPTPVIVTSNTNMCAVIDGNSTTFEHQQPLQDRMFKFELTRRLEHDFGKVTKQEVKEFFRWAQDHVTEVAHEFYVRKGGANKRPAPDDADKSEPKRACPSVADPSTSDAEGAPVDFADRYQNKCSRHAGMLQMLFPCKTCERMNQNFNICFTHGTRDCSECFPGVSESQPVVRKRTYRKLCAIHHLLGRAPEIACSACDLVNVDLDDCVSEQ

SEQ ID NO: 5156 - DNA, 4683 bp, Adeno-associated virus 6
ttggccactccctctctgcgcgctcgctcgctcactgaggccgggcgaccaaaggtcgcccgacgcccgggctttgcccgggcggcctcagtgagcgagcgagcgcgcagagagggagtggccaactccatcactaggggttcctggaggggtggagtcgtgacgtgaattacgtcatagggttagggaggtcctgtattagaggtcacgtgagtgttttgcgacattttgcgacaccatgtggtcacgctgggtatttaagcccgagtgagcacgcagggtctccattttgaagcgggaggtttgaacgcgcagcgccatgccggggttttacgagattgtgattaaggtccccagcgaccttgacgagcatctgcccggcatttctgacagctttgtgaactgggtggccgagaaggaatgggagttgccgccagattctgacatggatctgaatctgattgagcaggcacccctgaccgtggccgagaagctgcagcgcgacttcctggtccagtggcgccgcgtgagtaaggccccggaggccctcttctttgttcagttcgagaagggcgagtcctacttccacctccatattctggtggagaccacgggggtcaaatccatggtgctgggccgcttcctgagtcagattagggacaagctggtgcagaccatctaccgcgggatcgagccgaccctgcccaactggttcgcggtgaccaagacgcgtaatggcgccggaggggggaacaaggtggtggacgagtgctacatccccaactacctcctgcccaagactcagcccgagctgcagtgggcgtggactaacatggaggagtatataagcgcgtgtttaaacctggccgagcgcaaacggctcgtggcgcacgacctgacccacgtcagccagacccaggagcagaacaaggagaatctgaaccccaattctgacgcgcctgtcatccggtcaaaaacctccgcacgctacatggagctggtcgggtggctggtggaccggggcatcacctccgagaagcagtggatccaggaggaccaggcctcgtacatctccttcaacgccgcctccaactcgcggtcccagatcaaggccgctctggacaatgccggcaagatcatggcgctgaccaaatccgcgcccgactacctggtaggccccgctccgcccgccgacattaaaaccaaccgcatttaccgcatcctggagctgaacggctacgaccctgcctacgccggctccgtctttctcggctgggcccagaaaaggttcggaaaacgcaacaccatctggctgtttgggccggccaccacgggcaagaccaacatcgcggaagccatcgcccacgccgtgcccttctacggctgcgtcaactggaccaatgagaactttcccttcaacgattgcgtcgacaagatggtgatctggtgggaggagggcaagatgacggccaaggtcgtggagtccgccaaggccattctcggcggcagcaaggtgcgcgtggaccaaaagtgcaagtcgtccgcccagatcgatcccacccccgtgatcgtcacctccaacaccaacatgtgcgccgtgattgacgggaacagcaccaccttcgagcaccagcagccgttgcaggaccggatgttcaaatttgaactcacccgccgtctggagcatgactttggcaaggtgacaaagcaggaagtcaaagagttcttccgctgggcgcaggatcacgtgaccgaggtggcgcatgagttctacgtcagaaagggtggagccaacaagagacccgcccccgatgacgcggataaaagcgagcccaagcgggcctgcccctcagtcgcggatccatcgacgtcagacgcggaaggagctccggtggactttgccgacaggtaccaaaacaaatgttctcgtcacgcgggcatgcttcagatgctgtttccctgcaaaacatgcgagagaatgaatcagaatttcaacatttgcttcacgcacgggaccagagactgttcagaatgtttccccggcgtgtcagaatctcaaccggtcgtcagaaagaggacgtatcggaaactctgtgccattcatcatctgctggggcgggctcccgagattgcttgctcggcctgcgatctggtcaacgtggatctggatgactgtgtttctgagcaataaatgacttaaaccaggtatggctgccgatggttatcttccagattggctcgaggacaacctctctgagggcattcgcgagtggtgggacttgaaacctggagccccgaaacccaaagccaaccagcaaaagcaggacgacggccggggtctggtgcttcctggctacaagtacctcggacccttcaacggactcgacaagggggagcccgtcaacgcggcggatgcagcggccctcgagcacgacaaggcctacgaccagcagctcaaagcgggtgacaatccgtacctgcggtataaccacgccgacgccgagtttcaggagcgtctgcaagaagatacgtcttttgggggcaacctcgggcgagcagtcttccaggccaagaagagggttctcgaaccttttggtctggttgaggaaggtgctaagacggctcctggaaagaaacgtccggtagagcagtcgccacaagagccagactcctcctcgggcattggcaagacaggccagcagcccgctaaaaagagactcaattttggtcagactggcgactcagagtcagtccccgacccacaacctctcggagaacctccagcaacccccgctgctgtgggacctactacaatggcttcaggcggtggcgcaccaatggcagacaataacgaaggcgccgacggagtgggtaatgcctcaggaaattggcattgcgattccacatggctgggcgacagagtcatcaccaccagcacccgaacatgggccttgcccacctataacaaccacctctacaagcaaatctccagtgcttcaacgggggccagcaacgacaaccactacttcggctacagcaccccctgggggtattttgatttcaacagattccactgccatttctcaccacgtgactggcagcgactcatcaacaacaattggggattccggcccaagagactcaacttcaagctcttcaacatccaagtcaaggaggtcacgacgaatgatggcgtcacgaccatcgctaataaccttaccagcacggttcaagtcttctcggactcggagtaccagttgccgtacgtcctcggctctgcgcaccagggctgcctccctccgttcccggcggacgtgttcatgattccgcagtacggctacctaacgctcaacaatggcagccaggcagtgggacggtcatccttttactgcctggaatatttcccatcgcagatgctgagaacgggcaataactttaccttcagctacaccttcgaggacgtgcctttccacagcagctacgcgcacagccagagcctggaccggctgatgaatcctctcatcgaccagtacctgtattacctgaacagaactcagaatcagtccggaagtgcccaaaacaaggacttgctgtttagccgggggtctccagctggcatgtctgttcagcccaaaaactggctacctggaccctgttaccggcagcagcgcgtttctaaaacaaaaacagacaacaacaacagcaactttacctggactggtgcttcaaaatataaccttaatgggcgtgaatctataatcaaccctggcactgctatggcctcacacaaagacgacaaagacaagttctttcccatgagcggtgtcatgatttttggaaaggagagcgccggagcttcaaacactgcattggacaatgtcatgatcacagacgaagaggaaatcaaagccactaaccccgtggccaccgaaagatttgggactgtggcagtcaatctccagagcagcagcacagaccctgcgaccggagatgtgcatgttatgggagccttacctggaatggtgtggcaagacagagacgtatacctgcagggtcctatttgggccaaaattcctcacacggatggacactttcacccgtctcctctcatgggcggctttggacttaagcacccgcctcctcagatcctcatcaaaaacacgcctgttcctgcgaatcctccggcagagttttcggctacaaagtttgcttcattcatcacccagtattccacaggacaagtgagcgtggagattgaatgggagctgcagaaagaaaacagcaaacgctggaatcccgaagtgcagtatacatctaactatgcaaaatctgccaacgttgatttcactgtggacaacaatggactttatactgagcctcgccccattggcacccgttacctcacccgtcccctgtaattgtgtgttaatcaataaaccggttaattcgtgtcagttgaactttggtctcatgtcgttattatcttatctggtcaccatagcaaccggttacacattaactgcttagttgcgcttcgcgaatacccctagtgatggagttgcccactccctctatgcgcgctcgctcgctcggtggggccggcagagcagagctctgccgtctgcggacctttggtccgcaggccccaccgagcgagcgagcgcgcatagagggagtgggcaa

SEQ ID NO: 5157 - DNA, 2211 bp, Adeno-associated virus 6
atggctgccgatggttatcttccagattggctcgaggacaacctctctgagggcattcgcgagtggtgggacttgaaacctggagccccgaaacccaaagccaaccagcaaaagcaggacgacggccggggtctggtgcttcctggctacaagtacctcggacccttcaacggactcgacaagggggagcccgtcaacgcggcggatgcagcggccctcgagcacgacaaggcctacgaccagcagctcaaagcgggtgacaatccgtacctgcggtataaccacgccgacgccgagtttcaggagcgtctgcaagaagatacgtcttttgggggcaacctcgggcgagcagtcttccaggccaagaagagggttctcgaaccttttggtctggttgaggaaggtgctaagacggctcctggaaagaaacgtccggtagagcagtcgccacaagagccagactcctcctcgggcattggcaagacaggccagcagcccgctaaaaagagactcaattttggtcagactggcgactcagagtcagtccccgacccacaacctctcggagaacctccagcaacccccgctgctgtgggacctactacaatggcttcaggcggtggcgcaccaatggcagacaataacgaaggcgccgacggagtgggtaatgcctcaggaaattggcattgcgattccacatggctgggcgacagagtcatcaccaccagcacccgaacatgggccttgcccacctataacaaccacctctacaagcaaatctccagtgcttcaacgggggccagcaacgacaaccactacttcggctacagcaccccctgggggtattttgatttcaacagattccactgccatttctcaccacgtgactggcagcgactcatcaacaacaattggggattccggcccaagagactcaacttcaagctcttcaacatccaagtcaaggaggtcacgacgaatgatggcgtcacgaccatcgctaataaccttaccagcacggttcaagtcttctcggactcggagtaccagttgccgtacgtcctcggctctgcgcaccagggctgcctccctccgttcccggcggacgtgttcatgattccgcagtacggctacctaacgctcaacaatggcagccaggcagtgggacggtcatccttttactgcctggaatatttcccatcgcagatgctgagaacgggcaataactttaccttcagctacaccttcgaggacgtgcctttccacagcagctacgcgcacagccagagcctggaccggctgatgaatcctctcatcgaccagtacctgtattacctgaacagaactcagaatcagtccggaagtgcccaaaacaaggacttgctgtttagccgggggtctccagctggcatgtctgttcagcccaaaaactggctacctggaccctgttaccggcagcagcgcgtttctaaaacaaaaacagacaacaacaacagcaactttacctggactggtgcttcaaaatataaccttaatgggcgtgaatctataatcaaccctggcactgctatggcctcacacaaagacgacaaagacaagttctttcccatgagcggtgtcatgatttttggaaaggagagcgccggagcttcaaacactgcattggacaatgtcatgatcacagacgaagaggaaatcaaagccactaaccccgtggccaccgaaagatttgggactgtggcagtcaatctccagagcagcagcacagaccctgcgaccggagatgtgcatgttatgggagccttacctggaatggtgtggcaagacagagacgtatacctgcagggtcctatttgggccaaaattcctcacacggatggacactttcacccgtctcctctcatgggcggctttggacttaagcacccgcctcctcagatcctcatcaaaaacacgcctgttcctgcgaatcctccggcagagttttcggctacaaagtttgcttcattcatcacccagtattccacaggacaagtgagcgtggagattgaatgggagctgcagaaagaaaacagcaaacgctggaatcccgaagtgcagtatacatctaactatgcaaaatctgccaacgttgatttcactgtggacaacaatggactttatactgagcctcgccccattggcacccgttacctcacccgtcccctgtaa

SEQ ID NO: 5158 - DNA, 2214 bp, Adeno-associated virus 7
atggctgccgatggttatcttccagattggctcgaggacaacctctctgagggcattcgcgagtggtgggacctgaaacctggagccccgaaacccaaagccaaccagcaaaagcaggacaacggccggggtctggtgcttcctggctacaagtacctcggacccttcaacggactcgacaagggggagcccgtcaacgcggcggacgcagcggccctcgagcacgacaaggcctacgaccagcagctcaaagcgggtgacaatccgtacctgcggtataaccacgccgacgccgagtttcaggagcgtctgcaagaagatacgtcatttgggggcaacctcgggcgagcagtcttccaggccaagaagcgggttctcgaacctctcggtctggttgaggaaggcgctaagacggctcctgcaaagaagagaccggtagagccgtcacctcagcgttcccccgactcctccacgggcatcggcaagaaaggccagcagcccgccagaaagagactcaatttcggtcagactggcgactcagagtcagtccccgaccctcaacctctcggagaacctccagcagcgccctctagtgtgggatctggtacagtggctgcaggcggtggcgcaccaatggcagacaataacgaaggtgccgacggagtgggtaatgcctcaggaaattggcattgcgattccacatggctgggcgacagagtcattaccaccagcacccgaacctgggccctgcccacctacaacaaccacctctacaagcaaatctccagtgaaactgcaggtagtaccaacgacaacacctacttcggctacagcaccccctgggggtattttgactttaacagattccactgccacttctcaccacgtgactggcagcgactcatcaacaacaactggggattccggcccaagaagctgcggttcaagctcttcaacatccaggtcaaggaggtcacgacgaatgacggcgttacgaccatcgctaataaccttaccagcacgattcaggtattctcggactcggaataccagctgccgtacgtcctcggctctgcgcaccagggctgcctgcctccgttcccggcggacgtcttcatgattcctcagtacggctacctgactctcaacaatggcagtcagtctgtgggacgttcctccttctactgcctggagtacttcccctctcagatgctgagaacgggcaacaactttgagttcagctacagcttcgaggacgtgcctttccacagcagctacgcacacagccagagcctggaccggctgatgaatcccctcatcgaccagtacttgtactacctggccagaacacagagtaacccaggaggcacagctggcaatcgggaactgcagttttaccagggcgggccttcaactatggccgaacaagccaagaattggttacctggaccttgcttccggcaacaaagagtctccaaaacgctggatcaaaacaacaacagcaactttgcttggactggtgccaccaaatatcacctgaacggcagaaactcgttggttaatcccggcgtcgccatggcaactcacaaggacgacgaggaccgctttttcccatccagcggagtcctgatttttggaaaaactggagcaactaacaaaactacattggaaaatgtgttaatgacaaatgaagaagaaattcgtcctactaatcctgtagccacggaagaatacgggatagtcagcagcaacttacaagcggctaatactgcagcccagacacaagttgtcaacaaccagggagccttacctggcatggtctggcagaaccgggacgtgtacctgcagggtcccatctgggccaagattcctcacacggatggcaactttcacccgtctcctttgatgggcggctttggacttaaacatccgcctcctcagatcctgatcaagaacactcccgttcccgctaatcctccggaggtgtttactcctgccaagtttgcttcgttcatcacacagtacagcaccggacaagtcagcgtggaaatcgagtgggagctgcagaaggaaaacagcaagcgctggaacccggagattcagtacacctccaactttgaaaagcagactggtgtggactttgccgttgacagccagggtgtttactctgagcctcgccctattggcactcgttacctcacccgtaatctgtaa

SEQ ID NO: 5159 - protein, 738 aa, Adeno-associated virus 7
MAADGYLPDWLEDNLSEGIREWWALKPGAPKPKANQQKQDDGRGLVLPGYKYLGPFNGLDKGEPVNAADAAALEHDKAYDQQLQAGDNPYLRYNHADAEFQERLQEDTSFGGNLGRAVFQAKKRVLEPLGLVEEGAKTAPGKKRPVEPSPQRSPDSSTGIGKKGQQPARKRLNFGQTGDSESVPDPQPLGEPPAAPSGVGPNTMAAGGGAPMADNNEGADGVGSSSGNWHCDSTWLGDRVITTSTRTWALPTYNNHLYKQISNGTSGGATNDNTYFGYSTPWGYFDFNRFHCHFSPRDWQRLINNNWGFRPKRLSFKLFNIQVKEVTQNEGTKTIANNLTSTIQVFTDSEYQLPYVLGSAHQGCLPPFPADVFMIPQYGYLTLNNGSQAVGRSSFYCLEYFPSQMLRTGNNFQFTYTFEDVPFHSSYAHSQSLDRLMNPLIDQYLYYLSRTQTTGGTANTQTLGFSQGGPNTMANQAKNWLPGPCYRQQRVSTTTGQNNNSNFAWTAGTKYHLNGRNSLANPGIAMATHKDDEERFFPSNGILIFGKQNAARDNADYSDVMLTSEEEIKTTNPVATEEYGIVADNLQQQNTAPQIGTVNSQGALPGMVWQNRDVYLQGPIWAKIPHTDGNFHPSPLMGGFGLKHPPPQILIKNTPVPADPPTTFNQSKLNSFITQYSTGQVSVEIEWELQKENSKRWNPEIQYTSNYYKSTSVDFAVNTEGVYSEPRPIGTRYLTRNL

SEQ ID NO: 5160 - protein, 737 aa, Adeno-associated virus 7
MAADGYLPDWLEDNLSEGIREWWDLKPGAPKPKANQQKQDNGRGLVLPGYKYLGPFNGLDKGEPVNAADAAALEHDKAYDQQLKAGDNPYLRYNHADAEFQERLQEDTSFGGNLGRAVFQAKKRVLEPLGLVEEGAKTAPAKKRPVEPSPQRSPDSSTGIGKKGQQPARKRLNFGQTGDSESVPDPQPLGEPPAAPSSVGSGTVAAGGGAPMADNNEGADGVGNASGNWHCDSTWLGDRVITTSTRTWALPTYNNHLYKQISSETAGSTNDNTYFGYSTPWGYFDFNRFHCHFSPRDWQRLINNNWGFRPKKLRFKLFNIQVKEVTTNDGVTTIANNLTSTIQVFSDSEYQLPYVLGSAHQGCLPPFPADVFMIPQYGYLTLNNGSQSVGRSSFYCLEYFPSQMLRTGNNFEFSYSFEDVPFHSSYAHSQSLDRLMNPLIDQYLYYLARTQSNPGGTAGNRELQFYQGGPSTMAEQAKNWLPGPCFRQQRVSKTLDQNNNSNFAWTGATKYHLNGRNSLVNPGVAMATHKDDEDRFFPSSGVLIFGKTGATNKTTLENVLMTNEEEIRPTNPVATEEYGIVSSNLQAANTAAQTQVVNNQGALPGMVWQNRDVYLQGPIWAKIPHTDGNFHPSPLMGGFGLKHPPPQILIKNTPVPANPPEVFTPAKFASFITQYSTGQVSVEIEWELQKENSKRWNPEIQYTSNFEKQTGVDFAVDSQGVYSEPRPIGTRYLTRNL

SEQ ID NO: 5161 - protein, 623 aa, Adeno-associated virus 7
MPGFYEIVIKVPSDLDEHLPGISDSFVNWVAEKEWELPPDSDMDLNLIEQAPLTVAEKLQRDFLVQWRRVSKAPEALFFVQFEKGESYFHLHVLVETTGVKSMVLGRFLSQIREKLVQTIYRGVEPTLPNWFAVTKTRNGAGGGNKVVDECYIPNYLLPKTQPELQWAWTNMEEYISACLNLAERKRLVAQHLTHVSQTQEQNKENLNPNSDAPVIRSKTSARYMELVGWLVDRGITSEKQWIQEDQASYISFNAASNSRSQIKAALDNAGKIMALTKSAPDYLVGPSLPADIKTNRIYRILELNGYDPAYAGSVFLGWAQKKFGKRNTIWLFGPATTGKTNIAEAIAHAVPFYGCVNWTNENFPFNDCVDKMVIWWEEGKMTAKVVESAKAILGGSKVRVDQKCKSSAQIDPTPVIVTSNTNMCAVIDGNSTTFEHQQPLQDRMFKFELTRRLEHDFGKVTKQEVKEFFRWASDHVTEVAHEFYVRKGGASKRPAPDDADISEPKRACPSVADPSTSDAEGAPVDFADRYQNKCSRHAGMIQMLFPCKTCERMNQNFNICFTHGVRDCLECFPGVSESQPVVRKKTYRKLCAIHHLLGRAPEIACSACDLVNVDLDDCVSEQ

SEQ ID NO: 5162 - DNA, 4721 bp, Adeno-associated virus 7
ttggccactccctctatgcgcgctcgctcgctcggtggggcctgcggaccaaaggtccgcagacggcagagctctgctctgccggccccaccgagcgagcgagcgcgcatagagggagtggccaactccatcactaggggtaccgcgaagcgcctcccacgctgccgcgtcagcgctgacgtaaatcacgtcataggggagtggtcctgtattagctgtcacgtgagtgcttttgcgacattttgcgacaccacgtggccatttgaggtatatatggccgagtgagcgagcaggatctccattttgaccgcgaaatttgaacgagcagcagccatgccgggtttctacgagatcgtgatcaaggtgccgagcgacctggacgagcacctgccgggcatttctgactcgtttgtgaactgggtggccgagaaggaatgggagctgcccccggattctgacatggatctgaatctgatcgagcaggcacccctgaccgtggccgagaagctgcagcgcgacttcctggtccaatggcgccgcgtgagtaaggccccggaggccctgttctttgttcagttcgagaagggcgagagctacttccaccttcacgttctggtggagaccacgggggtcaagtccatggtgctaggccgcttcctgagtcagattcgggagaagctggtccagaccatctaccgcggggtcgagcccacgctgcccaactggttcgcggtgaccaagacgcgtaatggcgccggcggggggaacaaggtggtggacgagtgctacatccccaactacctcctgcccaagacccagcccgagctgcagtgggcgtggactaacatggaggagtatataagcgcgtgtttgaacctggccgaacgcaaacggctcgtggcgcagcacctgacccacgtcagccagacgcaggagcagaacaaggagaatctgaaccccaattctgacgcgcccgtgatcaggtcaaaaacctccgcgcgctacatggagctggtcgggtggctggtggaccggggcatcacctccgagaagcagtggatccaggaggaccaggcctcgtacatctccttcaacgccgcctccaactcgcggtcccagatcaaggccgcgctggacaatgccggcaagatcatggcgctgaccaaatccgcgcccgactacctggtggggccctcgctgcccgcggacattaaaaccaaccgcatctaccgcatcctggagctgaacgggtacgatcctgcctacgccggctccgtctttctcggctgggcccagaaaaagttcgggaagcgcaacaccatctggctgtttgggcccgccaccaccggcaagaccaacattgcggaagccatcgcccacgccgtgcccttctacggctgcgtcaactggaccaatgagaactttcccttcaacgattgcgtcgacaagatggtgatctggtgggaggagggcaagatgacggccaaggtcgtggagtccgccaaggccattctcggcggcagcaaggtgcgcgtggaccaaaagtgcaagtcgtccgcccagatcgaccccacccccgtgatcgtcacctccaacaccaacatgtgcgccgtgattgacgggaacagcaccaccttcgagcaccagcagccgttgcaggaccggatgttcaaatttgaactcacccgccgtctggagcacgactttggcaaggtgacgaagcaggaagtcaaagagttcttccgctgggccagtgatcacgtgaccgaggtggcgcatgagttctacgtcagaaagggcggagccagcaaaagacccgcccccgatgacgcggatataagcgagcccaagcgggcctgcccctcagtcgcggatccatcgacgtcagacgcggaaggagctccggtggactttgccgacaggtaccaaaacaaatgttctcgtcacgcgggcatgattcagatgctgtttccctgcaaaacgtgcgagagaatgaatcagaatttcaacatttgcttcacacacggggtcagagactgtttagagtgtttccccggcgtgtcagaatctcaaccggtcgtcagaaaaaagacgtatcggaaactctgcgcgattcatcatctgctggggcgggcgcccgagattgcttgctcggcctgcgacctggtcaacgtggacctggacgactgcgtttctgagcaataaatgacttaaaccaggtatggctgccgatggttatcttccagattggctcgaggacaacctctctgagggcattcgcgagtggtgggacctgaaacctggagccccgaaacccaaagccaaccagcaaaagcaggacaacggccggggtctggtgcttcctggctacaagtacctcggacccttcaacggactcgacaagggggagcccgtcaacgcggcggacgcagcggccctcgagcacgacaaggcctacgaccagcagctcaaagcgggtgacaatccgtacctgcggtataaccacgccgacgccgagtttcaggagcgtctgcaagaagatacgtcatttgggggcaacctcgggcgagcagtcttccaggccaagaagcgggttctcgaacctctcggtctggttgaggaaggcgctaagacggctcctgcaaagaagagaccggtagagccgtcacctcagcgttcccccgactcctccacgggcatcggcaagaaaggccagcagcccgccagaaagagactcaatttcggtcagactggcgactcagagtcagtccccgaccctcaacctctcggagaacctccagcagcgccctctagtgtgggatctggtacagtggctgcaggcggtggcgcaccaatggcagacaataacgaaggtgccgacggagtgggtaatgcctcaggaaattggcattgcgattccacatggctgggcgacagagtcattaccaccagcacccgaacctgggccctgcccacctacaacaaccacctctacaagcaaatctccagtgaaactgcaggtagtaccaacgacaacacctacttcggctacagcaccccctgggggtattttgactttaacagattccactgccacttctcaccacgtgactggcagcgactcatcaacaacaactggggattccggcccaagaagctgcggttcaagctcttcaacatccaggtcaaggaggtcacgacgaatgacggcgttacgaccatcgctaataaccttaccagcacgattcaggtattctcggactcggaataccagctgccgtacgtcctcggctctgcgcaccagggctgcctgcctccgttcccggcggacgtcttcatgattcctcagtacggctacctgactctcaacaatggcagtcagtctgtgggacgttcctccttctactgcctggagtacttcccctctcagatgctgagaacgggcaacaactttgagttcagctacagcttcgaggacgtgcctttccacagcagctacgcacacagccagagcctggaccggctgatgaatcccctcatcgaccagtacttgtactacctggccagaacacagagtaacccaggaggcacagctggcaatcgggaactgcagttttaccagggcgggccttcaactatggccgaacaagccaagaattggttacctggaccttgcttccggcaacaaagagtctccaaaacgctggatcaaaacaacaacagcaactttgcttggactggtgccaccaaatatcacctgaacggcagaaactcgttggttaatcccggcgtcgccatggcaactcacaaggacgacgaggaccgctttttcccatccagcggagtcctgatttttggaaaaactggagcaactaacaaaactacattggaaaatgtgttaatgacaaatgaagaagaaattcgtcctactaatcctgtagccacggaagaatacgggatagtcagcagcaacttacaagcggctaatactgcagcccagacacaagttgtcaacaaccagggagccttacctggcatggtctggcagaaccgggacgtgtacctgcagggtcccatctgggccaagattcctcacacggatggcaactttcacccgtctcctttgatgggcggctttggacttaaacatccgcctcctcagatcctgatcaagaacactcccgttcccgctaatcctccggaggtgtttactcctgccaagtttgcttcgttcatcacacagtacagcaccggacaagtcagcgtggaaatcgagtgggagctgcagaaggaaaacagcaagcgctggaacccggagattcagtacacctccaactttgaaaagcagactggtgtggactttgccgttgacagccagggtgtttactctgagcctcgccctattggcactcgttacctcacccgtaatctgtaattgcatgttaatcaataaaccggttgattcgtttcagttgaactttggtctcctgtgcttcttatcttatcggtttccatagcaactggttacacattaactgcttgggtgcgcttcacgataagaacactgacgtcaccgcggtacccctagtgatggagttggccactccctctatgcgcgctcgctcgctcggtggggcctgcggaccaaaggtccgcagacggcagagctctgctctgccggccccaccgagcgagcgagcgcgcatagagggagtggccaa

SEQ ID NO: 5163 - DNA, 2214 bp, Adeno-associated virus 7; identical to SEQ ID NO: 5158

SEQ ID NO: 5164 - protein, 737 aa, Adeno-associated virus 7; identical to SEQ ID NO: 5160

SEQ ID NO: 5165 - DNA, 2217 bp, Adeno-associated virus 8
atggctgccgatggttatcttccagattggctcgaggacaacctctctgagggcattcgcgagtggtgggcgctgaaacctggagccccgaagcccaaagccaaccagcaaaagcaggacgacggccggggtctggtgcttcctggctacaagtacctcggacccttcaacggactcgacaagggggagcccgtcaacgcggcggacgcagcggccctcgagcacgacaaggcctacgaccagcagctgcaggcgggtgacaatccgtacctgcggtataaccacgccgacgccgagtttcaggagcgtctgcaagaagatacgtcttttgggggcaacctcgggcgagcagtcttccaggccaagaagcgggttctcgaacctctcggtctggttgaggaaggcgctaagacggctcctggaaagaagagaccggtagagccatcaccccagcgttctccagactcctctacgggcatcggcaagaaaggccaacagcccgccagaaaaagactcaattttggtcagactggcgactcagagtcagttccagaccctcaacctctcggagaacctccagcagcgccctctggtgtgggacctaatacaatggctgcaggcggtggcgcaccaatggcagacaataacgaaggcgccgacggagtgggtagttcctcgggaaattggcattgcgattccacatggctgggcgacagagtcatcaccaccagcacccgaacctgggccctgcccacctacaacaaccacctctacaagcaaatctccaacgggacatcgggaggagccaccaacgacaacacctacttcggctacagcaccccctgggggtattttgactttaacagattccactgccacttttcaccacgtgactggcagcgactcatcaacaacaactggggattccggcccaagagactcagcttcaagctcttcaacatccaggtcaaggaggtcacgcagaatgaaggcaccaagaccatcgccaataacctcaccagcaccatccaggtgtttacggactcggagtaccagctgccgtacgttctcggctctgcccaccagggctgcctgcctccgttcccggcggacgtgttcatgattccccagtacggctacctaacactcaacaacggtagtcaggccgtgggacgctcctccttctactgcctggaatactttccttcgcagatgctgagaaccggcaacaacttccagtttacttacaccttcgaggacgtgcctttccacagcagctacgcccacagccagagcttggaccggctgatgaatcctctgattgaccagtacctgtactacttgtctcggactcaaacaacaggaggcacggcaaatacgcagactctgggcttcagccaaggtgggcctaatacaatggccaatcaggcaaagaactggctgccaggaccctgttaccgccaacaacgcgtctcaacgacaaccgggcaaaacaacaatagcaactttgcctggactgctgggaccaaataccatctgaatggaagaaattcattggctaatcctggcatcgctatggcaacacacaaagacgacgaggagcgtttttttcccagtaacgggatcctgatttttggcaaacaaaatgctgccagagacaatgcggattacagcgatgtcatgctcaccagcgaggaagaaatcaaaaccactaaccctgtggctacagaggaatacggtatcgtggcagataacttgcagcagcaaaacacggctcctcaaattggaactgtcaacagccagggggccttacccggtatggtctggcagaaccgggacgtgtacctgcagggtcccatctgggccaagattcctcacacggacggcaacttccacccgtctccgctgatgggcggctttggcctgaaacatcctccgcctcagatcctgatcaagaacacgcctgtacctgcggatcctccgaccaccttcaaccagtcaaagctgaactctttcatcacgcaatacagcaccggacaggtcagcgtggaaattgaatgggagctgcagaaggaaaacagcaagcgctggaaccccgagatccagtacacctccaactactacaaatctacaagtgtggactttgctgttaatacagaaggcgtgtactctgaaccccgccccattggcacccgttacctcacccgtaatctgtaa

SEQ ID NO: 5166 - DNA, 2213 bp, Adeno-associated virus 8
atggctgccgatggttatcttccagattggctcgaggacaacctctctgagggcattcgcgagtggtgggcgctgaaacctggagccccgaagcccaaagccaaccagcaaaagcaggacgacggccggggtctggtgcttcctggctacaagtacctcggacccttcaacggactcgacaagggggagcccgtcaacgcggcggacgcagcggccctcgagcacgacaaggcctacgaccagcagctgcaggcgggtgacaatccgtacctgcggtataaccacgccgacgccgagtttcaggagcgtctgcaagaagatacgtcttttgggggcaacctcgggcgagcagtcttccaggccaagaagcgggttctcgaacctctcggtctggttgaggaaggcgctaagacggctcctggaaagaagagaccggtagagccatcaccccagcgttctccagactcctctacgggcatcggcaagaaaggccaacagcccgccagaaaaagactcaattttggtcagactggcgactcagagtcagttccagaccctcaacctctcggagaacctccagcagcgccctctggtgtgggacctaatacaatggctgcaggcggtggcgcaccaatggcagacaataacgaaggcgccgacggagtgggtagttcctcgggaaattggcattgcgattccacatggctgggcgacagagtcatcaccaccagcacccgaacctgggccctgcccacctacaacaaccacctctacaagcaaatctccaacgggacatcgggaggagccaccaacgacaacacctacttcggctacagcaccccctgggggtattttgactttaacagattccactgccacttttcaccacgtgactggcagcgactcatcaacaacaactggggattccggcccaagagactcagcttcaagctcttcaacatccaggtcaaggaggtcacgcagaatgaaggcaccaagaccatcgccaataacctcaccagcaccatccaggtgtttacggactcggagtaccagctgccgtacgttctcggctctgcccaccagggctgcctgcctccgttcccggcggacgtgttcatgattccccagtacggctacctaacactcaacaacggtagtcaggccgtgggacgctcctccttctactgcctggaatactttccttcgcagatgctgagaaccggcaacaacttccagtttacttacaccttcgaggacgtgcctttccacagcagctacgcccacagccagagcttggaccggctgatgaatcctctgattgaccagtacctgtactacttgtctcggactcaaacaacaggaggcacggcaaatacgcagactctgggcttcagccaaggtgggcctaatacaatggccaatcaggcaaagaactggctgccaggaccctgttaccgccaacaacgcgtctcaacgacaaccgggcaaaacaacaatagcaactttgcctggactgctgggaccaaataccatctgaatggaagaaattcattggctaatcctggcatcgctatggcaacacacaaagacgacgaggagcgtttttttcccagtaacgggatcctgatttttggcaaacaaaatgctgccagagacaatgcggattacagcgatgtcatgctcaccagcgaggaagaaatcaaaaccactaaccctgtggctacagaggaatacggtatcgtggcagataacttgcagcagcaaaacacggctcctcaaattggaactgtcaacagccagggggccttacccggtatggtctggcagaaccgggacgtgtacctgcagggtcccatctgggccaagattcctcacacggacggcaacttccacccgtctccgctgatgggcggctttggcctgaaacatcctccgcctcagatcctgatcaagaacacgcctgtacctgcggatcctccgaccaccttcaaccagtcaaagctgaactctttcatcacgcaatacagcaccggacaggtcagcgtggaaattgaatgggagctgcagaaggaaaacagcaagcgctggaaccccgagatccagtacacctccaactactacaaatctacaagtgtggactttgctgtaatacagaaggcgtgtactctgaaccccgccccattggcacccgttacctcacccgtaatctg

SEQ ID NO: 5167 - DNA, 4393 bp, Adeno-associated virus 8
cagagagggagtggccaactccatcactaggggtagcgcgaagcgcctcccacgctgccgcgtcagcgctgacgtaaattacgtcataggggagtggtcctgtattagctgtcacgtgagtgcttttgcggcattttgcgacaccacgtggccatttgaggtatatatggccgagtgagcgagcaggatctccattttgaccgcgaaatttgaacgagcagcagccatgccgggcttctacgagatcgtgatcaaggtgccgagcgacctggacgagcacctgccgggcatttctgactcgtttgtgaactgggtggccgagaaggaatgggagctgcccccggattctgacatggatcggaatctgatcgagcaggcacccctgaccgtggccgagaagctgcagcgcgacttcctggtccaatggcgccgcgtgagtaaggccccggaggccctcttctttgttcagttcgagaagggcgagagctactttcacctgcacgttctggtcgagaccacgggggtcaagtccatggtgctaggccgcttcctgagtcagattcgggaaaagcttggtccagaccatctacccgcggggtcgagccccaccttgcccaactggttcgcggtgaccaaagacgcggtaatggcgccggcgggggggaacaaggtggtggacgagtgctacatccccaactacctcctgcccaagactcagcccgagctgcagtgggcgtggactaacatggaggagtatataagcgcgtgcttgaacctggccgagcgcaaacggctcgtggcgcagcacctgacccacgtcagccagacgcaggagcagaacaaggagaatctgaaccccaattctgacgcgcccgtgatcaggtcaaaaacctccgcgcgctatatggagctggtcgggtggctggtggaccggggcatcacctccgagaagcagtggatccaggaggaccaggcctcgtacatctccttcaacgccgcctccaactcgcggtcccagatcaaggccgcgctggacaatgccggcaagatcatggcgctgaccaaatccgcgcccgactacctggtggggccctcgctgcccgcggacattacccagaaccgcatctaccgcatcctcgctctcaacggctacgaccctgcctacgccggctccgtctttctcggctgggctcagaaaaagttcgggaaacgcaacaccatctggctgtttggacccgccaccaccggcaagaccaacattgcggaagccatcgcccacgccgtgcccttctacggctgcgtcaactggaccaatgagaactttcccttcaatgattgcgtcgacaagatggtgatctggtgggaggagggcaagatgacggccaaggtcgtggagtccgccaaggccattctcggcggcagcaaggtgcgcgtggaccaaaagtgcaagtcgtccgcccagatcgaccccacccccgtgatcgtcacctccaacaccaacatgtgcgccgtgattgacgggaacagcaccaccttcgagcaccagcagcctctccaggaccggatgtttaagttcgaactcacccgccgtctggagcacgactttggcaaggtgacaaagcaggaagtcaaagagttcttccgctgggccagtgatcacgtgaccgaggtggcgcatgagttttacgtcagaaagggcggagccagcaaaagacccgcccccgatgacgcggataaaagcgagcccaagcgggcctgcccctcagtcgcggatccatcgacgtcagacgcggaaggagctccggtggactttgccgacaggtaccaaaacaaatgttctcgtcacgcgggcatgcttcagatgctgtttccctgcaaaacgtgcgagagaatgaatcagaatttcaacatttgcttcacacacggggtcagagactgctcagagtgtttccccggcgtgtcagaatctcaaccggtcgtcagaaagaggacgtatcggaaactctgtgcgattcatcatctgctggggcgggctcccgagattgcttgctcggcctgcgatctggtcaacgtggacctggatgactgtgtttctgagcaataaatgacttaaaccaggtatggctgccgatggttatcttccagattggctcgaggacaacctctctgagggcattcgcgagtggtgggcgctgaaacctggagccccgaagcccaaagccaaccagcaaaagcaggacgacggccggggtctggtgcttcctggctacaagtacctcggacccttcaacggactcgacaagggggagcccgtcaacgcggcggacgcagcggccctcgagcacgacaaggcctacgaccagcagctgcaggcgggtgacaatccgtacctgcggtataaccacgccgacgccgagtttcaggagcgtctgcaagaagatacgtcttttgggggcaacctcgggcgagcagtcttccaggccaagaagcgggttctcgaacctctcggtctggttgaggaaggcgctaagacggctcctggaaagaagagaccggtagagccatcaccccagcgttctccagactcctctacgggcatcggcaagaaaggccaacagcccgccagaaaaagactcaattttggtcagactggcgactcagagtcagttccagaccctcaacctctcggagaacctccagcagcgccctctggtgtgggacctaatacaatggctgcaggcggtggcgcaccaatggcagacaataacgaaggcgccgacggagtgggtagttcctcgggaaattggcattgcgattccacatggctgggcgacagagtcatcaccaccagcacccgaacctgggccctgcccacctacaacaaccacctctacaagcaaatctccaacgggacatcgggaggagccaccaacgacaacacctacttcggctacagcaccccctgggggtattttgactttaacagattccactgccacttttcaccacgtgactggcagcgactcatcaacaacaactggggattccggcccaagagactcagcttcaagctcttcaacatccaggtcaaggaggtcacgcagaatgaaggcaccaagaccatcgccaataacctcaccagcaccatccaggtgtttacggactcggagtaccagctgccgtacgttctcggctctgcccaccagggctgcctgcctccgttcccggcggacgtgttcatgattccccagtacggctacctaacactcaacaacggtagtcaggccgtgggacgctcctccttctactgcctggaatactttccttcgcagatgctgagaaccggcaacaacttccagtttacttacaccttcgaggacgtgcctttccacagcagctacgcccacagccagagcttggaccggctgatgaatcctctgattgaccagtacctgtactacttgtctcggactcaaacaacaggaggcacggcaaatacgcagactctgggcttcagccaaggtgggcctaatacaatggccaatcaggcaaagaactggctgccaggaccctgttaccgccaacaacgcgtctcaacgacaaccgggcaaaacaacaatagcaactttgcctggactgctgggaccaaataccatctgaatggaagaaattcattggctaatcctggcatcgctatggcaacacacaaagacgacgaggagcgtttttttcccagtaacgggatcctgatttttggcaaacaaaatgctgccagagacaatgcggattacagcgatgtcatgctcaccagcgaggaagaaatcaaaaccactaaccctgtggctacagaggaatacggtatcgtggcagataacttgcagcagcaaaacacggctcctcaaattggaactgtcaacagccagggggccttacccggtatggtctggcagaaccgggacgtgtacctgcagggtcccatctgggccaagattcctcacacggacggcaacttccacccgtctccgctgatgggcggctttggcctgaaacatcctccgcctcagatcctgatcaagaacacgcctgtacctgcggatcctccgaccaccttcaaccagtcaaagctgaactctttcatcacgcaatacagcaccggacaggtcagcgtggaaattgaatgggagctgcagaaggaaaacagcaagcgctggaaccccgagatccagtacacctccaactactacaaatctacaagtgtggactttgctgttaatacagaaggcgtgtactctgaaccccgccccattggcacccgttacctcacccgtaatctgtaattgcctgttaatcaataaaccggttgattcgtttcagttgaactttggtctctgcg

SEQ ID NO: 5168 - protein, 738 aa, Adeno-associated virus 8; identical to SEQ ID NO: 5159

SEQ ID NO: 5169 - protein, 737 aa, Adeno-associated virus 8
MAADGYLPDWLEDNLSEGIREWWALKPGAPKPKANQQKQDDGRGLVLPGYKYLGPFNGLDKGEPVNAADAAALEHDKAYDQQLQAGDNPYLRYNHADAEFQERLQEDTSFGGNLGRAVFQAKKRVLEPLGLVEEGAKTAPGKKRPVEPSPQRSPDSSTGIGKKGQQPARKRLNFGQTGDSESVPDPQPLGEPPAAPSGVGPNTMAAGGGAPMADNNEGADGVGSSSGNWHCDSTWLGDRVITTSTRTWALPTYNNHLYKQISNGTSGGATNDNTYFGYSTPWGYFDFNRFHCHFSPRDWQRLINNNWGFRPKRLSFKLFNIQVKEVTQNEGTKTIANNLTSTIQVFTDSEYQLPYVLGSAHQGCLPPFPADVFMIPQYGYLTLNNGSQAVGRSSFYCLEYFPSQMLRTGNNFQFTYTFEDVPFHSSYAHSQSLDRLMNPLIDQYLYYLSRTQTTGGTANTQTLGFSQGGPNTMANQAKNWLPGPCYRQQRVSTTTGQNNNSNFAWTAGTKYHLNGRNSLANPGIAMATHKDDEERFFPSNGILIFGKQNAARDNADYSDVMLTSEEEIKTTNPVATEEYGIVADNLQQQNTAPQIGTVNSQGALPGMVWQNRDVYLQGPIWAKIPHTDGNFHPSPLMGGFGLKHPPPQILIKNTPVPADPPTTFNQSKLNSFITQYSTGQVSVEIEWELQKENSKRWNPEIQYTSNYYKSTSVDFAVIQKACTLNPAPLAPVTSPVI

SEQ ID NO: 5170 - DNA, 2217 bp, Adeno-associated virus 8; identical to SEQ ID NO: 5165

SEQ ID NO: 5171 - DNA, 4385 bp, Adeno-associated virus 9
cagagagggagtggccaactccatcactaggggtaatcgcgaagcgcctcccacgctgccgcgtcagcgctgacgtagattacgtcataggggagtggtcctgtattagctgtcacgtgagtgcttttgcgacattttgcgacaccacatggccatttgaggtatatatggccgagtgagcgagcaggatctccattttgaccgcgaaatttgaacgagcagcagccatgccgggcttctacgagattgtgatcaaggtgccgagcgacctggacgagcacctgccgggcatttctgactcttttgtgaactgggtggccgagaaggaatgggagctgcccccggattctgacatggatcggaatctgatcgagcaggcacccctgaccgtggccgagaagctgcagcgcgacttcctggtccaatggcgccgcgtgagtaaggccccggaggccctcttctttgttcagttcgagaagggcgagagctactttcacctgcacgttctggtcgagaccacgggggtcaagtccatggtgctaggccgcttcctgagtcagattcgggagaagctggtccagaccatctaccgcgggatcgagccgaccctgcccaactggttcgcggtgaccaagacgcgtaatggcgccggcggggggaacaaggtggtggacgagtgctacatccccaactacctcctgcccaagactcagcccgagctgcagtgggcgtggactaacatggaggagtatataagcgcgtgcttgaacctggccgagcgcaaacggctcgtggcgcagcacctgacccacgtcagccagacgcaggagcagaacaaggagaatctgaaccccaattctgacgcgcccgtgatcaggtcaaaaacctccgcgcgctacatggagctggtcgggtggctggtggaccggggcatcacctccgagaagcagtggatccaggaggaccaggcctcgtacatctccttcaacgccgcctccaactcgcggtcccagatcaaggccgcgctggacaatgccggcaagatcatggcgctgaccaaatccgcgcccgactacctggtaggcccttcacttccggtggacattacgcagaaccgcatctaccgcatcctgcagctcaacggctacgaccctgcctacgccggctccgtctttctcggctgggcacaaaagaagttcgggaaacgcaacaccatctggctgtttgggccggccaccacgggaaagaccaacatcgcagaagccattgcccacgccgtgcccttctacggctgcgtcaactggaccaatgagaactttcccttcaacgattgcgtcgacaagatggtgatctggtgggaggagggcaagatgacggccaaggtcgtggagtccgccaaggccattctcggcggcagcaaggtgcgcgtggaccaaaagtgcaagtcgtccgcccagatcgaccccactcccgtgatcgtcacctccaacaccaacatgtgcgccgtgattgacgggaacagcaccaccttcgagcaccagcagcctctccaggaccggatgtttaagttcgaactcacccgccgtctggagcacgactttggcaaggtgacaaagcaggaagtcaaagagttcttccgctgggccagtgatcacgtgaccgaggtggcgcatgagttttacgtcagaaagggcggagccagcaaaagacccgcccccgatgacgcggataaaagcgagcccaagcgggcctgcccctcagtcgcggatccatcgacgtcagacgcggaaggagctccggtggactttgccgacaggtaccaaaacaaatgttctcgtcacgcgggcatgcttcagatgctgcttccctgcaaaacgtgcgagagaatgaatcagaatttcaacatttgcttcacacacggggtcagagactgctcagagtgtttccccggcgtgtcagaatctcaaccggtcgtcagaaagaggacgtatcggaaactctgtgcgattcatcatctgctggggcgggctcccgagattgcttgctcggcctgcgatctggtcaacgtggacctggatgactgtgtttctgagcaataaatgacttaaaccaggtatggctgccgatggttatcttccagattggctcgaggacaacctctctgagggcattcgcgagtggtgggcgctgaaacctggagccccgaagcccaaagccaaccagcaaaagcaggacgacggccggggtctggtgcttcctggctacaagtacctcggacccttcaacggactcgacaagggggagcccgtcaacgcggcggacgcagcggccctcgagcacggcaaggcctacgaccagcagctgcaggcgggtgacaatccgtacctgcggtataaccacgccgacgccgagtttcaggagcgtctgcaagaagatacgtcttttgggggcaacctcgggcgagcagtcttccaggccaagaagcgggttctcgaacctctcggtctggttgaggaaggcgctaagacggctcctggaaagaagagaccggtagagccatcaccccagcgttctccagactcctctacgggcatcggcaagaaaggccaacagcccgccagaaaaagactcaattttggtcagactggcgactcagagtcagttccagaccctcaacctctcggagaacctccagcagcgccctctggtgtgggacctaatacaatggctgcaggcggtggcgcaccaatggcagacaataacgaaggcgccgacggagtgggtaattcctcgggaaattggcattgcgattccacatggctgggggacagagtcatcaccaccagcacccgaacctgggcattgcccacctacaacaaccacctctacaagcaaatctccaatggaacatcgggaggaagcaccaacgacaacacctactttggctacagcaccccctgggggtattttgacttcaacagattccactgccacttctcaccacgtgactggcagcgactcatcaacaacaactggggattccggccaaagagactcaacttcaagctgttcaacatccaggtcaaggaggttacgacgaacgaaggcaccaagaccatcgccaataaccttaccagcaccgtccaggtctttacggactcggagtaccagctaccgtacgtcctaggctctgcccaccaaggatgcctgccaccgtttcctgcagacgtcttcatggttcctcagtacggctacctgacgctcaacaatggaagtcaagcgttaggacgttcttctttctactgtctggaatacttcccttctcagatgctgagaaccggcaacaactttcagttcagctacactttcgaggacgtgcctttccacagcagctacgcacacagccagagtctagatcgactgatgaaccccctcatcgaccagtacctatactacctggtcagaacacagacaactggaactgggggaactcaaactttggcattcagccaagcaggccctagctcaatggccaatcaggctagaaactgggtacccgggccttgctaccgtcagcagcgcgtctccacaaccaccaaccaaaataacaacagcaactttgcgtggacgggagctgctaaattcaagctgaacgggagagactcgctaatgaatcctggcgtggctatggcatcgcacaaagacgacgaggaccgcttctttccatcaagtggcgttctcatatttggcaagcaaggagccgggaacgatggagtcgactacagccaggtgctgattacagatgaggaagaaattaaagccaccaaccctgtagccacagaggaatacggagcagtggccatcaacaaccaggccgctaacacgcaggcgcaaactggacttgtgcataaccagggagttattcctggtatggtctggcagaaccgggacgtgtacctgcagggccctatttgggctaaaatacctcacacagatggcaactttcacccgtctcctctgatgggtggatttggactgaaacacccacctccacagattctaattaaaaatacaccagtgccggcagatcctcctcttaccttcaatcaagccaagctgaactctttcatcacgcagtacagcacgggacaagtcagcgtggaaatcgagtgggagctgcagaaagaaaacagcaagcgctggaatccagagatccagtatacttcaaactactacaaatctacaaatgtggactttgctgtcaataccaaaggtgtttactctgagcctcgccccattggtactcgttacctcacccgtaatttgtaattgcctgttaatcaataaaccggttaattcgtttcagttgaactttggtctctgcg

SEQ ID NO: 5172 - DNA, 4382 bp, Adeno-associated virus 9
cagagagggagtggccaactccatcactaggggtaatcgcgaagcgcctcccacgctgccgcgtcagcgctgacgtagattacgtcataggggagtggtcctgtattagctgtcacgtgagtgcttttgcgacattttgcgacaccacatggccatttgaggtatatatggccgagtgagcgagcaggatctccattttgaccgcgaaatttgaacgagcagcagccatgccgggcttctacgagattgtgatcaaggtgccgagcgacctggacgagcacctgccgggcatttctgactcttttgtgaactgggtggccgagaaggaatgggagctgcccccggattctgacatggatcggaatctgatcgagcaggcacccctgaccgtggccgagaagctgtagcgcgacttcctggtccaatggcgccgcgtgagtaaggccccggaggccctcttctttgttcagttcgagaagggcgagagctactttcacctgcacgttctggtcgagaccacgggggtcaagtccatggtgctaggccgcttcctgagtcagattcgggagaagctggtccagaccatctaccgcgggatcgagccgaccctgcccaactggttcgcggtgaccaagacgcgtaatggcgccggcggggggaacaaggtggtggacgagtgctacatccccaactacctcctgcccaagactcagcccgagctgcagtgggcgtggactaacatggaggagtatataagcgcgtgcttgaacctggccgagcgcaaacggctcgtggcgcagcacctgacccacgtcagccagacgcaggagcagaacaaggagaatctgaaccccaattctgacgcgcccgtgatcaggtcaaaaacctccgcgcgctacatggagctggtcgggtggctggtggaccggggcatcacctccgagaagcagtggatccaggaggaccaggcctcgtacatctccttcaacgccgcctccaactcgcggtcccagatcaaggccgcgctggacaatgccggcaagatcatggcgctgaccaaatccgcgcccgactacctggtaggcccttcacttccggtggacattacgcagaaccgcatctaccgcatcctgcagctcaacggctacgaccctgcctacgccggctccgtctttctcggctgggcacaaaagaagttcgggaaacgcaacaccatctggctgtttgggccggccaccacgggaaagaccaacatcgcagaagccattgcccacgccgtgcccttctacggctgcgtcaactggaccaatgagaactttcccttcaacgattgcgtcgacaagatggtgatctggtgggaggagggcaagatgacggccaaggtcgtggagtccgccaaggccattctcggcggcagcaaggtgcgcgtggaccaaaagtgcaagtcgtccgcccagatcgaccccactcccgtgatcgtcacctccaacaccaacatgtgcgccgtgattgacgggaacagcaccaccttcgagcaccagcagcctctccaggaccggatgtttaagttcgaactcacccgccgtctggagcacgactttggcaaggtgacaaagcaggaagtcaaagagttcttccgctgggccagtgatcacgtgaccgaggtggcgcatgagttttacgtcagaaagggcggagccagcaaaagacccgcccccgatgacgcggataaaagcgagcccaagcgggcctgcccctcagtcgcggatccatcgacgtcagacgcggaaggagctccggtggactttgccgacaggtaccaaaacaaatgttctcgtcacgcgggcatgcttcagatgctgcttccctgcaaaacgtgcgagagaatgaatcagaatttcaacatttgcttcacacacggggtcagagactgctcagagtgtttccccggcgtgtcagaatctcaaccggtcgtcagaaagaggacgtatcggaaactctgtgcgattcatcatctgctggggcgggctcccgagattgcttgctcggcctgcgatctggtcaacgtggacctggatgactgtgtttctgagcaataaatgacttaaaccaggtatggctgccgatggttatcttccagattggctcgaggacaacctctctgagggcattcgcgagtggtgggacctgaaacctggagccccgaaacccaaagccaaccagcaaaagcaggacgacggccggggtctggtgcttcctggctacaagtacctcggacccttcaacggactcgacaagggggagcccgtcaacgcggcggacgcagcggccctcgagcacgacaaggcctacgaccagcagctcaaagcgggtgacaatccgtacctgcggtataaccacgccgacgccgagtttcaggagcgtctgcaagaagatacgtcttttgggggcaacctcgggcgagcagtcttccaggccaagaagcgggttctcgaacctctcggtctggttgaggaaggcgctaagacggctcctggaaagaagagaccggtagagcagtcaccccaagaaccagactcatcctcgggcatcggcaaatcaggccagcagcccgctaaaaagagactcaattttggtcagactggcgactcagagtcagtccccgacccacaacctctcggagaacctccagaagccccctcaggtctgggacctaatacaatggcttcaggcggtggcgctccaatggcagacaataacgaaggcgccgacggagtgggtaattcctcgggaaattggcattgcgattccacatggctgggggacagagtcatcaccaccagcacccgaacctgggcattgcccacctacaacaaccacctctacaagcaaatctccaatggaacatcgggaggaagcaccaacgacaacacctactttggctacagcaccccctgggggtattttgacttcaacagattccactgccacttctcaccacgtgactggcagcgactcatcaacaacaactggggattccggccaaagagactcaacttcaagctgttcaacatccaggtcaaggaggttacgacgaacgaaggcaccaagaccatcgccaataaccttaccagcaccgtccaggtctttacggactcggagtaccagctaccgtacgtcctaggctctgcccaccaaggatgcctgccaccgtttcctgcagacgtcttcatggttcctcagtacggctacctgacgctcaacaatggaagtcaagcgttaggacgttcttctttctactgtctggaatacttcccttctcagatgctgagaaccggcaacaactttcagttcagctacactttcgaggacgtgcctttccacagcagctacgcacacagccagagtctagatcgactgatgaaccccctcatcgaccagtacctatactacctggtcagaacacagacaactggaactgggggaactcaaactttggcattcagccaagcaggccctagctcaatggccaatcaggctagaaactgggtacccgggccttgctaccgtcagcagcgcgtctccacaaccaccaaccaaaataacaacagcaactttgcgtggacgggagctgctaaattcaagctgaacgggagagactcgctaatgaatcctggcgtggctatggcatcgcacaaagacgacgaggaccgcttctttccatcaagtggcgttctcatatttggcaagcaaggagccgggaacgatggagtcgactacagccaggtgctgattacagatgaggaagaaattaaagccaccaaccctgtagccacagaggaatacggagcagtggccatcaacaaccaggccgctaacacgcaggcgcaaactggacttgtgcataaccagggagttattcctggtatggtctggcagaaccgggacgtgtacctgcagggccctatttgggctaaaatacctcacacagatggcaactttcacccgtctcctctgatgggtggatttggactgaaacacccacctccacagattctaattaaaaatacaccagtgccggcagatcctcctcttaccttcaatcaagccaagctgaactctttcatcacgcagtacagcacgggacaagtcagcgtggaaatcgagtgggagctgcagaaagaaaacagcaagcgctggaatccagagatccagtatacttcaaactactacaaatctacaaatgtggactttgctgtcaataccgaaggtgtttactctgagcctcgccccattggtactcgttacctcacccgtaatttgtaattgcctgttaatcaataaaccggttaattcgtttcagttgaactttggtctctgcg

SEQ ID NO: 5173 - protein, 736 aa, Adeno-associated virus 9; identical to SEQ ID NO: 4805

SEQ ID NO: 5174 - protein, 736 aa, Adeno-associated virus 9
MAADGYLPDWLEDNLSEGIREWWDLKPGAPKPKANQQKQDDGRGLVLPGYKYLGPFNGLDKGEPVNAADAAALEHDKAYDQQLKAGDNPYLRYNHADAEFQERLQEDTSFGGNLGRAVFQAKKRVLEPLGLVEEGAKTAPGKKRPVEQSPQEPDSSSGIGKSGQQPAKKRLNFGQTGDSESVPDPQPLGEPPEAPSGLGPNTMASGGGAPMADNNEGADGVGNSSGNWHCDSTWLGDRVITTSTRTWALPTYNNHLYKQISNGTSGGSTNDNTYFGYSTPWGYFDFNRFHCHFSPRDWQRLINNNWGFRPKRLNFKLFNIQVKEVTTNEGTKTIANNLTSTVQVFTDSEYQLPYVLGSAHQGCLPPFPADVFMVPQYGYLTLNNGSQALGRSSFYCLEYFPSQMLRTGNNFQFSYTFEDVPFHSSYAHSQSLDRLMNPLIDQYLYYLVRTQTTGTGGTQTLAFSQAGPSSMANQARNWVPGPCYRQQRVSTTTNQNNNSNFAWTGAAKFKLNGRDSLMNPGVAMASHKDDEDRFFPSSGVLIFGKQGAGNDGVDYSQVLITDEEEIKATNPVATEEYGAVAINNQAANTQAQTGLVHNQGVIPGMVWQNRDVYLQGPIWAKIPHTDGNFHPSPLMGGFGLKHPPPQILIKNTPVPADPPLTFNQAKLNSFITQYSTGQVSVEIEWELQKENSKRWNPEIQYTSNYYKSTNVDFAVNTEGVYSEPRPIGTRYLTRNL

SEQ ID NO: 5175 - protein, 623 aa, Adeno-associated virus 9
MPGFYEIVIKVPSDLDEHLPGISDSFVNWVAEKEWELPPDSDMDRNLIEQAPLTVAEKLQRDFLVQWRRVSKAPEALFFVQFEKGESYFHLHVLVETTGVKSMVLGRFLSQIREKLVQTIYRGIEPTLPNWFAVTKTRNGAGGGNKVVDECYIPNYLLPKTQPELQWAWTNMEEYISACLNLAERKRLVAQHLTHVSQTQEQNKENLNPNSDAPVIRSKTSARYMELVGWLVDRGITSEKQWIQEDQASYISFNAASNSRSQIKAALDNAGKIMALTKSAPDYLVGPSLPVDITQNRIYRILQLNGYDPAYAGSVFLGWAQKKFGKRNTIWLFGPATTGKTNIAEAIAHAVPFYGCVNWTNENFPFNDCVDKMVIWWEEGKMTAKVVESAKAILGGSKVRVDQKCKSSAQIDPTPVIVTSNTNMCAVIDGNSTTFEHQQPLQDRMFKFELTRRLEHDFGKVTKQEVKEFFRWASDHVTEVAHEFYVRKGGASKRPAPDDADKSEPKRACPSVADPSTSDAEGAPVDFADRYQNKCSRHAGMLQMLLPCKTCERMNQNFNICFTHGVRDCSECFPGVSESQPVVRKRTYRKLCAIHHLLGRAPEIACSACDLVNVDLDDCVSEQ

SEQ ID NO: 5176 - DNA, 1797 bp, Artificial Sequence
  Description of Artificial Sequence: Synthetic polynucleotide
acggctccgaccggagacaagcggaaaggcgaagacgaacctcgtttgcccgacacttcttcacagactcccaagaaaaacaagaagcctcgcaaggaaagaccttccggcggggcagaagatccgggcgaaggcacctcttccaacgctggagcagcagcacccgcctctagtgtgggatcatctatcatggctgaaggaggtggcggcccagtgggcgatgcaggccagggtgccgatggagtgggcaattcctccggaaattggcattgcgattcccaatggctggaaaacggagtcgtcactcgaaccacccgaacctgggtcttgcccagctacaacaaccacctgtacaaacgaatccaaggacccagcggaggcgacaacaacaacaaattctttggattcagcaccccctggggatactttgactacaatcgattccactgccacttttccccgcgagactggcaacgactcatcaacaacaactggggcatccgtcccaaagcgatgcgctttagactctttaacatccaggttaaagaggtcacggtccaagacttcaacaccaccatcggcaacaacctcaccagtacggtccaggtctttgcggacaaggactaccaactgccgtacgtcctcggatcggctaccgaaggcaccttcccgccgttcccagcggatatctacacgatcccgcagtacgggtactgcacgctaaactacaacaacgaggcggtggatcgttcggccttctactgtctggactactttccctcagacatgctgcggacaggaaataactttgagtttacttacaccttcgaggacgttcctttccatagcatgtttgcccacaaccagacgctagaccggctgatgaatcccctcgtggatcagtacctctgggctttcagctccgtcagccaagcaggctcatctggacgagctcttcattactcgcgggcgactaaaaccaacatggcggctcaatataggaactggttacctgggcctttcttccgtgatcagcaaatctttacgggcgctagcaacatcactaaaaataacgtctttagcgtttgggaaaaaggcaagcaatgggaactcgacaatcggaccaacctaatgcagcccggtcctgcggcagcgaccacctttagcggagaacctgaccgtcaagccatgcaaaacacgctggcttttagcaggaccgtctacgatcaaacgaccgccacgaccgatcgtaaccagatactcatcaccaacgaagacgaaatcagacccaccaactcggtcggtatcgacgcgtggggagcagttcccaccaacaaccagtcgatcgtgacccccggcactcgcgcggccgtcaacaatcaaggggcgcttcccgggatggtgtggcaaaacagagacatttaccctacagggacccatttggccaaaattcccgacactgacaatcacttccatccgtccccgcttattgggcggtttggctgcaagcatccccctccccagattttcattaaaaacacacccgtccctgccaacccttcggaaacgttccagacggccaaagtggcctccttcatcaaccagtactcgaccggacagtgcaccgtcgaaatcttttgggaactcaagaaggaaacctccaagcgctggaaccccgaaatccagttcacctccaactttggcaacgcggccgacatccagtttgccgtctccgacacgggatcctattccgaacctcgtcccatcggtacccgttaccttaccaaacctctgtaa

SEQ ID NO: 5177 - DNA, 1989 bp, Artificial Sequence
  Description of Artificial Sequence: Synthetic polynucleotide
atgaggtcgtactacgaggtcatcgttcagctgcccaacgacgtcgagagtcaggtacctggaatctccgattcgttcgtcaactggattacgtcgcgagaatggacgttgcctgaggacgccgattgggatttggaccaggtcgatcaagttcaactgacgctcggcgacaaaatccaacgggagattcgaactcattgggggacgatggccaaagaaccggactttcactattttatccaactggaacaaggtgaggtgttctttcatttacacgtcctgctggaaacgtgttccgtaaagccgatggtactcggaagatatatccgacatattcaacaaaaaattgtgagtaaagtctactgcgccacgagcctacgatggaaggatggatgcgtggtgaccaagaccaaaaatttcgggggcgcgaacaaggtccgggccgagtcgtatattcccgcctacctgatcccgaaacagcaaccggaagtgcagtgggcgtggactaacgtgcccgagtatataaaagcgtgcttgcaccgagaactgcgtgccagtctcgcgcgacttcacttcgaggaggcgggcgtctcgcaatccaaggaaaatctcgcgagaactgcagacggcgctcccgtgatgccgacccgcgtcagcaaacgctacatggagctcgtggattggctcgtggagaaggggatcaccaccgagaaggaatggctgctggaaaacagagaaagctttcggagctttcaggcctcgagcaactcggcgcgtcagatcaagacggccctgcaaggcgccattcaggagatgcttctgaccaagacggcggaggactacctcgtcggaaaggatcccgtctcggacgacgacatccgtcagaaccgcatctacaagattctggaactgaaccactacgacccagcgtacgtggggagtattttggtcgggtggtgccagaagaaatggggcaagcgaaacacgctgtggctgttcggacatgcgaccaccggcaagaccaacatcgcggaggctattgcccatgctgtgccgttctatggatgcgttaactggaccaacgagaactttccgttcaacgactgcgtcgaaaaaatgattatctggtgggaggagggcaaaatgaccgccaaagtggtggaaacagccaaggcgattctgggaggatctcgggtgagagtggaccaaaaatgcaaagcttcggttccgatcgaaccgacgccggtcattattaccagtaacaccaacatgtgttatgtcatcgacgggaacacgaccacgttcgagcataagcagccgttggaggacaggatgtttaagctcgaattgctgactcggttgcctgatgactttggtaaggtgaccaaacaggaggtgcgtcaattcttcaggtggtctcaggatcacctgacccctgtgatcccagaattcctagtgcggaaggcggagtctcgcaaaagacccgccccttccggggaaggctatataagcccgacaaagcggcccgcgctcgcagagcagcagcaggcgtcggagagcgcggacccggttcccaccaggtatcgtatcaaatgctcgaaacattgcggtatggataaaatgttgtttccttgccaaatttgtgaatcgatgaacagagatattaatatttgtgctattcataaaacgaccgactgtaaagagtgtttccccgactacggggataaagatgatgtagaactacccccctgtacagaacacaacgtgtctcgttgttatcaatgtcattcgggcgaattgtatcgcgtgacttcggactctgacgagaaacctgcccccgagagtgatgaaggcaccgagccatcctatgctccctgcacgattcaccacctgatgggcaagagtcacgggttagtcacttgcgcggcgtgtcggttgaaaaatagtacgttgcatgatgacttggatgacggtgatctcgaacaataa

SEQ ID NO: 5178 - DNA, 1626 bp, Artificial Sequence
  Description of Artificial Sequence: Synthetic polynucleotide
atgaggtcgtactacgaggtcatcgttcagctgcccaacgacgtcgagagtcaggtacctggaatctccgattcgttcgtcaactggattacgtcgcgagaatggacgttgcctgaggacgccgattgggatttggaccaggtcgatcaagttcaactgacgctcggcgacaaaatccaacgggagattcgaactcattgggggacgatggccaaagaaccggactttcactattttatccaactggaacaaggtgaggtgttctttcatttacacgtcctgctggaaacgtgttccgtaaagccgatggtactcggaagatatatccgacatattcaacaaaaaattgtgagtaaagtctactgcgccacgagcctacgatggaaggatggatgcgtggtgaccaagaccaaaaatttcgggggcgcgaacaaggtccgggccgagtcgtatattcccgcctacctgatcccgaaacagcaaccggaagtgcagtgggcgtggactaacgtgcccgagtatataaaagcgtgcttgcaccgagaactgcgtgccagtctcgcgcgacttcacttcgaggaggcgggcgtctcgcaatccaaggaaaatctcgcgagaactgcagacggcgctcccgtgatgccgacccgcgtcagcaaacgctacatggagctcgtggattggctcgtggagaaggggatcaccaccgagaaggaatggctgctggaaaacagagaaagctttcggagctttcaggcctcgagcaactcggcgcgtcagatcaagacggccctgcaaggcgccattcaggagatgcttctgaccaagacggcggaggactacctcgtcggaaaggatcccgtctcggacgacgacatccgtcagaaccgcatctacaagattctggaactgaaccactacgacccagcgtacgtggggagtattttggtcgggtggtgccagaagaaatggggcaagcgaaacacgctgtggctgttcggacatgcgaccaccggcaagaccaacatcgcggaggctattgcccatgctgtgccgttctatggatgcgttaactggaccaacgagaactttccgttcaacgactgcgtcgaaaaaatgattatctggtgggaggagggcaaaatgaccgccaaagtggtggaaacagccaaggcgattctgggaggatctcgggtgagagtggaccaaaaatgcaaagcttcggttccgatcgaaccgacgccggtcattattaccagtaacaccaacatgtgttatgtcatcgacgggaacacgaccacgttcgagcataagcagccgttggaggacaggatgtttaagctcgaattgctgactcggttgcctgatgactttggtaaggtgaccaaacaggaggtgcgtcaattcttcaggtggtctcaggatcacctgacccctgtgatcccagaattcctagtgcggaaggcggagtctcgcaaaagacccgccccttccggggaaggctatataagcccgacaaagcggcccgcgctcgcagagcagcagcaggcgtcggagagcgcggacccggttcccaccagattggttggagcggttggtcaaaaagggagtgaatgctgcagctga

SEQ ID NO: 5179 - DNA, 1323 bp, Artificial Sequence
  Description of Artificial Sequence: Synthetic polynucleotide
atggagctcgtggattggctcgtggagaaggggatcaccaccgagaaggaatggctgctggaaaacagagaaagctttcggagctttcaggcctcgagcaactcggcgcgtcagatcaagacggccctgcaaggcgccattcaggagatgcttctgaccaagacggcggaggactacctcgtcggaaaggatcccgtctcggacgacgacatccgtcagaaccgcatctacaagattctggaactgaaccactacgacccagcgtacgtggggagtattttggtcgggtggtgccagaagaaatggggcaagcgaaacacgctgtggctgttcggacatgcgaccaccggcaagaccaacatcgcggaggctattgcccatgctgtgccgttctatggatgcgttaactggaccaacgagaactttccgttcaacgactgcgtcgaaaaaatgattatctggtgggaggagggcaaaatgaccgccaaagtggtggaaacagccaaggcgattctgggaggatctcgggtgagagtggaccaaaaatgcaaagcttcggttccgatcgaaccgacgccggtcattattaccagtaacaccaacatgtgttatgtcatcgacgggaacacgaccacgttcgagcataagcagccgttggaggacaggatgtttaagctcgaattgctgactcggttgcctgatgactttggtaaggtgaccaaacaggaggtgcgtcaattcttcaggtggtctcaggatcacctgacccctgtgatcccagaattcctagtgcggaaggcggagtctcgcaaaagacccgccccttccggggaaggctatataagcccgacaaagcggcccgcgctcgcagagcagcagcaggcgtcggagagcgcggacccggttcccaccaggtatcgtatcaaatgctcgaaacattgcggtatggataaaatgttgtttccttgccaaatttgtgaatcgatgaacagagatattaatatttgtgctattcataaaacgaccgactgtaaagagtgtttccccgactacggggataaagatgatgtagaactacccccctgtacagaacacaacgtgtctcgttgttatcaatgtcattcgggcgaattgtatcgcgtgacttcggactctgacgagaaacctgcccccgagagtgatgaaggcaccgagccatcctatgctccctgcacgattcaccacctgatgggcaagagtcacgggttagtcacttgcgcggcgtgtcggttgaaaaatagtacgttgcatgatgacttggatgacggtgatctcgaacaataa

SEQ ID NO: 5180 - DNA, 960 bp, Artificial Sequence
  Description of Artificial Sequence: Synthetic polynucleotide
atggagctcgtggattggctcgtggagaaggggatcaccaccgagaaggaatggctgctggaaaacagagaaagctttcggagctttcaggcctcgagcaactcggcgcgtcagatcaagacggccctgcaaggcgccattcaggagatgcttctgaccaagacggcggaggactacctcgtcggaaaggatcccgtctcggacgacgacatccgtcagaaccgcatctacaagattctggaactgaaccactacgacccagcgtacgtggggagtattttggtcgggtggtgccagaagaaatggggcaagcgaaacacgctgtggctgttcggacatgcgaccaccggcaagaccaacatcgcggaggctattgcccatgctgtgccgttctatggatgcgttaactggaccaacgagaactttccgttcaacgactgcgtcgaaaaaatgattatctggtgggaggagggcaaaatgaccgccaaagtggtggaaacagccaaggcgattctgggaggatctcgggtgagagtggaccaaaaatgcaaagcttcggttccgatcgaaccgacgccggtcattattaccagtaacaccaacatgtgttatgtcatcgacgggaacacgaccacgttcgagcataagcagccgttggaggacaggatgtttaagctcgaattgctgactcggttgcctgatgactttggtaaggtgaccaaacaggaggtgcgtcaattcttcaggtggtctcaggatcacctgacccctgtgatcccagaattcctagtgcggaaggcggagtctcgcaaaagacccgccccttccggggaaggctatataagcccgacaaagcggcccgcgctcgcagagcagcagcaggcgtcggagagcgcggacccggttcccaccagattggttggagcggttggtcaaaaagggagtgaatgctgcagctga

SEQ ID NO: 5181 - DNA, 1608 bp, Artificial Sequence
  Description of Artificial Sequence: Synthetic polynucleotide
atggctgaaggaggtggcggcccagtgggcgatgcaggccagggtgccgatggagtgggcaattcctccggaaattggcattgcgattcccaatggctggaaaacggagtcgtcactcgaaccacccgaacctgggtcttgcccagctacaacaaccacctgtacaaacgaatccaaggacccagcggaggcgacaacaacaacaaattctttggattcagcaccccctggggatactttgactacaatcgattccactgccacttttccccgcgagactggcaacgactcatcaacaacaactggggcatccgtcccaaagcgatgcgctttagactctttaacatccaggttaaagaggtcacggtccaagacttcaacaccaccatcggcaacaacctcaccagtacggtccaggtctttgcggacaaggactaccaactgccgtacgtcctcggatcggctaccgaaggcaccttcccgccgttcccagcggatatctacacgatcccgcagtacgggtactgcacgctaaactacaacaacgaggcggtggatcgttcggccttctactgtctggactactttccctcagacatgctgcggacaggaaataactttgagtttacttacaccttcgaggacgttcctttccatagcatgtttgcccacaaccagacgctagaccggctgatgaatcccctcgtggatcagtacctctgggctttcagctccgtcagccaagcaggctcatctggacgagctcttcattactcgcgggcgactaaaaccaacatggcggctcaatataggaactggttacctgggcctttcttccgtgatcagcaaatctttacgggcgctagcaacatcactaaaaataacgtctttagcgtttgggaaaaaggcaagcaatgggaactcgacaatcggaccaacctaatgcagcccggtcctgcggcagcgaccacctttagcggagaacctgaccgtcaagccatgcaaaacacgctggcttttagcaggaccgtctacgatcaaacgaccgccacgaccgatcgtaaccagatactcatcaccaacgaagacgaaatcagacccaccaactcggtcggtatcgacgcgtggggagcagttcccaccaacaaccagtcgatcgtgacccccggcactcgcgcggccgtcaacaatcaaggggcgcttcccgggatggtgtggcaaaacagagacatttaccctacagggacccatttggccaaaattcccgacactgacaatcacttccatccgtccccgcttattgggcggtttggctgcaagcatccccctccccagattttcattaaaaacacacccgtccctgccaacccttcggaaacgttccagacggccaaagtggcctccttcatcaaccagtactcgaccggacagtgcaccgtcgaaatcttttgggaactcaagaaggaaacctccaagcgctggaaccccgaaatccagttcacctccaactttggcaacgcggccgacatccagtttgccgtctccgacacgggatcctattccgaacctcgtcccatcggtacccgttaccttaccaaacctctgtaa

SEQ ID NO: 5182 - DNA, 2232 bp, Artificial Sequence
  Description of Artificial Sequence: Synthetic polynucleotide
atgtctctcatttctgatgcgattccagattggttggagcggttggtcaaaaagggagtgaatgctgcagctgatttctaccatttggaaagcggtcctcctcgtcctaaggcaaatcagcaaactcaagaatctcttgaaaaggacgattcgagaggtctcgtgttcccaggctacaattatctaggccctttcaacggtctagataaaggagaacccgtcaacgaggcagacgctgccgccttagaacacgacaaggcttacgacctcgaaatcaaggacgggcacaacccgtactttgagtacaacgaggccgacagacgtttccaggaacgtctcaaagacgatacctcctttggaggcaatttaggtaaagccatcttccaggccaaaaagagggttctcgaaccctttggtctggtggaagactcaaagacggctccgaccggagacaagcggaaaggcgaagacgaacctcgtttgcccgacacttcttcacagactcccaagaaaaacaagaagcctcgcaaggaaagaccttccggcggggcagaagatccgggcgaaggcacctcttccaacgctggagcagcagcacccgcctctagtgtgggatcatctatcatggctgaaggaggtggcggcccagtgggcgatgcaggccagggtgccgatggagtgggcaattcctccggaaattggcattgcgattcccaatggctggaaaacggagtcgtcactcgaaccacccgaacctgggtcttgcccagctacaacaaccacctgtacaaacgaatccaaggacccagcggaggcgacaacaacaacaaattctttggattcagcaccccctggggatactttgactacaatcgattccactgccacttttccccgcgagactggcaacgactcatcaacaacaactggggcatccgtcccaaagcgatgcgctttagactctttaacatccaggttaaagaggtcacggtccaagacttcaacaccaccatcggcaacaacctcaccagtacggtccaggtctttgcggacaaggactaccaactgccgtacgtcctcggatcggctaccgaaggcaccttcccgccgttcccagcggatatctacacgatcccgcagtacgggtactgcacgctaaactacaacaacgaggcggtggatcgttcggccttctactgtctggactactttccctcagacatgctgcggacaggaaataactttgagtttacttacaccttcgaggacgttcctttccatagcatgtttgcccacaaccagacgctagaccggctgatgaatcccctcgtggatcagtacctctgggctttcagctccgtcagccaagcaggctcatctggacgagctcttcattactcgcgggcgactaaaaccaacatggcggctcaatataggaactggttacctgggcctttcttccgtgatcagcaaatctttacgggcgctagcaacatcactaaaaataacgtctttagcgtttgggaaaaaggcaagcaatgggaactcgacaatcggaccaacctaatgcagcccggtcctgcggcagcgaccacctttagcggagaacctgaccgtcaagccatgcaaaacacgctggcttttagcaggaccgtctacgatcaaacgaccgccacgaccgatcgtaaccagatactcatcaccaacgaagacgaaatcagacccaccaactcggtcggtatcgacgcgtggggagcagttcccaccaacaaccagtcgatcgtgacccccggcactcgcgcggccgtcaacaatcaaggggcgcttcccgggatggtgtggcaaaacagagacatttaccctacagggacccatttggccaaaattcccgacactgacaatcacttccatccgtccccgcttattgggcggtttggctgcaagcatccccctccccagattttcattaaaaacacacccgtccctgccaacccttcggaaacgttccagacggccaaagtggcctccttcatcaaccagtactcgaccggacagtgcaccgtcgaaatcttttgggaactcaagaaggaaacctccaagcgctggaaccccgaaatccagttcacctccaactttggcaacgcggccgacatccagtttgccgtctccgacacgggatcctattccgaacctcgtcccatcggtacccgttaccttaccaaacctctgtaa

SEQ ID NO: 5183 - protein, 535 aa, Artificial Sequence
  Description of Artificial Sequence: Synthetic polypeptide
MAEGGGGPVGDAGQGADGVGNSSGNWHCDSQWLENGVVTRTTRTWVLPSYNNHLYKRIQGPSGGDNNNKFFGFSTPWGYFDYNRFHCHFSPRDWQRLINNNWGIRPKAMRFRLFNIQVKEVTVQDFNTTIGNNLTSTVQVFADKDYQLPYVLGSATEGTFPPFPADIYTIPQYGYCTLNYNNEAVDRSAFYCLDYFPSDMLRTGNNFEFTYTFEDVPFHSMFAHNQTLDRLMNPLVDQYLWAFSSVSQAGSSGRALHYSRATKTNMAAQYRNWLPGPFFRDQQIFTGASNITKNNVFSVWEKGKQWELDNRTNLMQPGPAAATTFSGEPDRQAMQNTLAFSRTVYDQTTATTDRNQILITNEDEIRPTNSVGIDAWGAVPTNNQSIVTPGTRAAVNNQGALPGMVWQNRDIYPTGTHLAKIPDTDNHFHPSPLIGRFGCKHPPPQIFIKNTPVPANPSETFQTAKVASFINQYSTGQCTVEIFWELKKETSKRWNPEIQFTSNFGNAADIQFAVSDTGSYSEPRPIGTRYLTKPL

SEQ ID NO: 5184 - protein, 440 aa, Artificial Sequence
  Description of Artificial Sequence: Synthetic polypeptide
MELVDWLVEKGITTEKEWLLENRESFRSFQASSNSARQIKTALQGAIQEMLLTKTAEDYLVGKDPVSDDDIRQNRIYKILELNHYDPAYVGSILVGWCQKKWGKRNTLWLFGHATTGKTNIAEAIAHAVPFYGCVNWTNENFPFNDCVEKMIIWWEEGKMTAKVVETAKAILGGSRVRVDQKCKASVPIEPTPVIITSNTNMCYVIDGNTTTFEHKQPLEDRMFKLELLTRLPDDFGKVTKQEVRQFFRWSQDHLTPVIPEFLVRKAESRKRPAPSGEGYISPTKRPALAEQQQASESADPVPTRYRIKCSKHCGMDKMLFPCQICESMNRDINICAIHKTTDCKECFPDYGDKDDVELPPCTEHNVSRCYQCHSGELYRVTSDSDEKPAPESDEGTEPSYAPCTIHHLMGKSHGLVTCAACRLKNSTLHDDLDDGDLEQ

SEQ ID NO: 5185 - protein, 319 aa, Artificial Sequence
  Description of Artificial Sequence: Synthetic polypeptide
MELVDWLVEKGITTEKEWLLENRESFRSFQASSNSARQIKTALQGAIQEMLLTKTAEDYLVGKDPVSDDDIRQNRIYKILELNHYDPAYVGSILVGWCQKKWGKRNTLWLFGHATTGKTNIAEAIAHAVPFYGCVNWTNENFPFNDCVEKMIIWWEEGKMTAKVVETAKAILGGSRVRVDQKCKASVPIEPTPVIITSNTNMCYVIDGNTTTFEHKQPLEDRMFKLELLTRLPDDFGKVTKQEVRQFFRWSQDHLTPVIPEFLVRKAESRKRPAPSGEGYISPTKRPALAEQQQASESADPVPTRLVGAVGQKGSECCS

SEQ ID NO: 5186 - protein, 662 aa, Artificial Sequence
  Description of Artificial Sequence: Synthetic polypeptide
MRSYYEVIVQLPNDVESQVPGISDSFVNWITSREWTLPEDADWDLDQVDQVQLTLGDKIQREIRTHWGTMAKEPDFHYFIQLEQGEVFFHLHVLLETCSVKPMVLGRYIRHIQQKIVSKVYCATSLRWKDGCVVTKTKNFGGANKVRAESYIPAYLIPKQQPEVQWAWTNVPEYIKACLHRELRASLARLHFEEAGVSQSKENLARTADGAPVMPTRVSKRYMELVDWLVEKGITTEKEWLLENRESFRSFQASSNSARQIKTALQGAIQEMLLTKTAEDYLVGKDPVSDDDIRQNRIYKILELNHYDPAYVGSILVGWCQKKWGKRNTLWLFGHATTGKTNIAEAIAHAVPFYGCVNWTNENFPFNDCVEKMIIWWEEGKMTAKVVETAKAILGGSRVRVDQKCKASVPIEPTPVIITSNTNMCYVIDGNTTTFEHKQPLEDRMFKLELLTRLPDDFGKVTKQEVRQFFRWSQDHLTPVIPEFLVRKAESRKRPAPSGEGYISPTKRPALAEQQQASESADPVPTRYRIKCSKHCGMDKMLFPCQICESMNRDINICAIHKTTDCKECFPDYGDKDDVELPPCTEHNVSRCYQCHSGELYRVTSDSDEKPAPESDEGTEPSYAPCTIHHLMGKSHGLVTCAACRLKNSTLHDDLDDGDLEQ

SEQ ID NO: 5187 - protein, 541 aa, Artificial Sequence
  Description of Artificial Sequence: Synthetic polypeptide
MRSYYEVIVQLPNDVESQVPGISDSFVNWITSREWTLPEDADWDLDQVDQVQLTLGDKIQREIRTHWGTMAKEPDFHYFIQLEQGEVFFHLHVLLETCSVKPMVLGRYIRHIQQKIVSKVYCATSLRWKDGCVVTKTKNFGGANKVRAESYIPAYLIPKQQPEVQWAWTNVPEYIKACLHRELRASLARLHFEEAGVSQSKENLARTADGAPVMPTRVSKRYMELVDWLVEKGITTEKEWLLENRESFRSFQASSNSARQIKTALQGAIQEMLLTKTAEDYLVGKDPVSDDDIRQNRIYKILELNHYDPAYVGSILVGWCQKKWGKRNTLWLFGHATTGKTNIAEAIAHAVPFYGCVNWTNENFPFNDCVEKMIIWWEEGKMTAKVVETAKAILGGSRVRVDQKCKASVPIEPTPVIITSNTNMCYVIDGNTTTFEHKQPLEDRMFKLELLTRLPDDFGKVTKQEVRQFFRWSQDHLTPVIPEFLVRKAESRKRPAPSGEGYISPTKRPALAEQQQASESADPVPTRLVGAVGQKGSECCS

SEQ ID NO: 5188 - protein, 743 aa, Artificial Sequence
  Description of Artificial Sequence: Synthetic polypeptide
MSLISDAIPDWLERLVKKGVNAAADFYHLESGPPRPKANQQTQESLEKDDSRGLVFPGYNYLGPFNGLDKGEPVNEADAAALEHDKAYDLEIKDGHNPYFEYNEADRRFQERLKDDTSFGGNLGKAIFQAKKRVLEPFGLVEDSKTAPTGDKRKGEDEPRLPDTSSQTPKKNKKPRKERPSGGAEDPGEGTSSNAGAAAPASSVGSSIMAEGGGGPVGDAGQGADGVGNSSGNWHCDSQWLENGVVTRTTRTWVLPSYNNHLYKRIQGPSGGDNNNKFFGFSTPWGYFDYNRFHCHFSPRDWQRLINNNWGIRPKAMRFRLFNIQVKEVTVQDFNTTIGNNLTSTVQVFADKDYQLPYVLGSATEGTFPPFPADIYTIPQYGYCTLNYNNEAVDRSAFYCLDYFPSDMLRTGNNFEFTYTFEDVPFHSMFAHNQTLDRLMNPLVDQYLWAFSSVSQAGSSGRALHYSRATKTNMAAQYRNWLPGPFFRDQQIFTGASNITKNNVFSVWEKGKQWELDNRTNLMQPGPAAATTFSGEPDRQAMQNTLAFSRTVYDQTTATTDRNQILITNEDEIRPTNSVGIDAWGAVPTNNQSIVTPGTRAAVNNQGALPGMVWQNRDIYPTGTHLAKIPDTDNHFHPSPLIGRFGCKHPPPQIFIKNTPVPANPSETFQTAKVASFINQYSTGQCTVEIFWELKKETSKRWNPEIQFTSNFGNAADIQFAVSDTGSYSEPRPIGTRYLTKPL

SEQ ID NO: 5189 - protein, 598 aa, Artificial Sequence
  Description of Artificial Sequence: Synthetic polypeptide
TAPTGDKRKGEDEPRLPDTSSQTPKKNKKPRKERPSGGAEDPGEGTSSNAGAAAPASSVGSSIMAEGGGGPVGDAGQGADGVGNSSGNWHCDSQWLENGVVTRTTRTWVLPSYNNHLYKRIQGPSGGDNNNKFFGFSTPWGYFDYNRFHCHFSPRDWQRLINNNWGIRPKAMRFRLFNIQVKEVTVQDFNTTIGNNLTSTVQVFADKDYQLPYVLGSATEGTFPPFPADIYTIPQYGYCTLNYNNEAVDRSAFYCLDYFPSDMLRTGNNFEFTYTFEDVPFHSMFAHNQTLDRLMNPLVDQYLWAFSSVSQAGSSGRALHYSRATKTNMAAQYRNWLPGPFFRDQQIFTGASNITKNNVFSVWEKGKQWELDNRTNLMQPGPAAATTFSGEPDRQAMQNTLAFSRTVYDQTTATTDRNQILITNEDEIRPTNSVGIDAWGAVPTNNQSIVTPGTRAAVNNQGALPGMVWQNRDIYPTGTHLAKIPDTDNHFHPSPLIGRFGCKHPPPQIFIKNTPVPANPSETFQTAKVASFINQYSTGQCTVEIFWELKKETSKRWNPEIQFTSNFGNAADIQFAVSDTGSYSEPRPIGTRYLTKPL

SEQ ID NO: 5190 - DNA, 4694 bp, Artificial Sequence
  Description of Artificial Sequence: Synthetic polynucleotide
tggccagtttccaagacaggctcgctcgctcactcgggccggggccccaaaggggcccctagcgaccgcttcgcggtcgcggcccgagtgagcgagcgagcctgtcttggaaactggccagcactccggtgaggtaatgccgtcacgtggtcgggaatgggaacgggaaatctcgcgagaacgtaaacaaatataagacggcgccacacggcgctgcgtcatacgcgcgcgcgcaccggcgagatgaggtcgtactacgaggtcatcgttcagctgcccaacgacgtcgagagtcaggtacctggaatctccgattcgttcgtcaactggattacgtcgcgagaatggacgttgcctgaggacgccgattgggatttggaccaggtcgatcaagttcaactgacgctcggcgacaaaatccaacgggagattcgaactcattgggggacgatggccaaagaaccggactttcactattttatccaactggaacaaggtgaggtgttctttcatttacacgtcctgctggaaacgtgttccgtaaagccgatggtactcggaagatatatccgacatattcaacaaaaaattgtgagtaaagtctactgcgccacgagcctacgatggaaggatggatgcgtggtgaccaagaccaaaaatttcgggggcgcgaacaaggtccgggccgagtcgtatattcccgcctacctgatcccgaaacagcaaccggaagtgcagtgggcgtggactaacgtgcccgagtatataaaagcgtgcttgcaccgagaactgcgtgccagtctcgcgcgacttcacttcgaggaggcgggcgtctcgcaatccaaggaaaatctcgcgagaactgcagacggcgctcccgtgatgccgacccgcgtcagcaaacgctacatggagctcgtggattggctcgtggagaaggggatcaccaccgagaaggaatggctgctggaaaacagagaaagctttcggagctttcaggcctcgagcaactcggcgcgtcagatcaagacggccctgcaaggcgccattcaggagatgcttctgaccaagacggcggaggactacctcgtcggaaaggatcccgtctcggacgacgacatccgtcagaaccgcatctacaagattctggaactgaaccactacgacccagcgtacgtggggagtattttggtcgggtggtgccagaagaaatggggcaagcgaaacacgctgtggctgttcggacatgcgaccaccggcaagaccaacatcgcggaggctattgcccatgctgtgccgttctatggatgcgttaactggaccaacgagaactttccgttcaacgactgcgtcgaaaaaatgattatctggtgggaggagggcaaaatgaccgccaaagtggtggaaacagccaaggcgattctgggaggatctcgggtgagagtggaccaaaaatgcaaagcttcggttccgatcgaaccgacgccggtcattattaccagtaacaccaacatgtgttatgtcatcgacgggaacacgaccacgttcgagcataagcagccgttggaggacaggatgtttaagctcgaattgctgactcggttgcctgatgactttggtaaggtgaccaaacaggaggtgcgtcaattcttcaggtggtctcaggatcacctgacccctgtgatcccagaattcctagtgcggaaggcggagtctcgcaaaagacccgccccttccggggaaggctatataagcccgacaaagcggcccgcgctcgcagagcagcagcaggcgtcggagagcgcggacccggttcccaccaggtatcgtatcaaatgctcgaaacattgcggtatggataaaatgttgtttccttgccaaatttgtgaatcgatgaacagagatattaatatttgtgctattcataaaacgaccgactgtaaagagtgtttccccgactacggggataaagatgatgtagaactacccccctgtacagaacacaacgtgtctcgttgttatcaatgtcattcgggcgaattgtatcgcgtgacttcggactctgacgagaaacctgcccccgagagtgatgaaggcaccgagccatcctatgctccctgcacgattcaccacctgatgggcaagagtcacgggttagtcacttgcgcggcgtgtcggttgaaaaatagtacgttgcatgatgacttggatgacggtgatctcgaacaataaatgattgaaatgtagccatgtctctcatttctgatgcgattccagattggttggagcggttggtcaaaaagggagtgaatgctgcagctgatttctaccatttggaaagcggtcctcctcgtcctaaggcaaatcagcaaactcaagaatctcttgaaaaggacgattcgagaggtctcgtgttcccaggctacaattatctaggccctttcaacggtctagataaaggagaacccgtcaacgaggcagacgctgccgccttagaacacgacaaggcttacgacctcgaaatcaaggacgggcacaacccgtactttgagtacaacgaggccgacagacgtttccaggaacgtctcaaagacgatacctcctttggaggcaatttaggtaaagccatcttccaggccaaaaagagggttctcgaaccctttggtctggtggaagactcaaagacggctccgaccggagacaagcggaaaggcgaagacgaacctcgtttgcccgacacttcttcacagactcccaagaaaaacaagaagcctcgcaaggaaagaccttccggcggggcagaagatccgggcgaaggcacctcttccaacgctggagcagcagcacccgcctctagtgtgggatcatctatcatggctgaaggaggtggcggcccagtgggcgatgcaggccagggtgccgatggagtgggcaattcctccggaaattggcattgcgattcccaatggctggaaaacggagtcgtcactcgaaccacccgaacctgggtcttgcccagctacaacaaccacctgtacaaacgaatccaaggacccagcggaggcgacaacaacaacaaattctttggattcagcaccccctggggatactttgactacaatcgattccactgccacttttccccgcgagactggcaacgactcatcaacaacaactggggcatccgtcccaaagcgatgcgctttagactctttaacatccaggttaaagaggtcacggtccaagacttcaacaccaccatcggcaacaacctcaccagtacggtccaggtctttgcggacaaggactaccaactgccgtacgtcctcggatcggctaccgaaggcaccttcccgccgttcccagcggatatctacacgatcccgcagtacgggtactgcacgctaaactacaacaacgaggcggtggatcgttcggccttctactgtctggactactttccctcagacatgctgcggacaggaaataactttgagtttacttacaccttcgaggacgttcctttccatagcatgtttgcccacaaccagacgctagaccggctgatgaatcccctcgtggatcagtacctctgggctttcagctccgtcagccaagcaggctcatctggacgagctcttcattactcgcgggcgactaaaaccaacatggcggctcaatataggaactggttacctgggcctttcttccgtgatcagcaaatctttacgggcgctagcaacatcactaaaaataacgtctttagcgtttgggaaaaaggcaagcaatgggaactcgacaatcggaccaacctaatgcagcccggtcctgcggcagcgaccacctttagcggagaacctgaccgtcaagccatgcaaaacacgctggcttttagcaggaccgtctacgatcaaacgaccgccacgaccgatcgtaaccagatactcatcaccaacgaagacgaaatcagacccaccaactcggtcggtatcgacgcgtggggagcagttcccaccaacaaccagtcgatcgtgacccccggcactcgcgcggccgtcaacaatcaaggggcgcttcccgggatggtgtggcaaaacagagacatttaccctacagggacccatttggccaaaattcccgacactgacaatcacttccatccgtccccgcttattgggcggtttggctgcaagcatccccctccccagattttcattaaaaacacacccgtccctgccaacccttcggaaacgttccagacggccaaagtggcctccttcatcaaccagtactcgaccggacagtgcaccgtcgaaatcttttgggaactcaagaaggaaacctccaagcgctggaaccccgaaatccagttcacctccaactttggcaacgcggccgacatccagtttgccgtctccgacacgggatcctattccgaacctcgtcccatcggtacccgttaccttaccaaacctctgtaaattaaacccttcaataaaccgtttatgcgtaactgtatttccgtctcctgtcgttattcagtcacatgatgcggcattacctcaccggagtgctggccagtttccaagacaggctcgctcgctcactcgggccggggccccaaaggggcccctagcgaccgcttcgcggtcgcggcccgagtgagcgagcgagcctgtcttggaaactggcca

SEQ ID NO: 5191 - DNA, 2211 bp, Artificial Sequence
  Description of Artificial Sequence: Synthetic polynucleotide
atggctgctgatggttatcttccagattggctcgaggacactctctctgaaggaataagacagtggtggaagctcaaacctggcccaccaccaccaaagcccgcagagcggcataaggacgacagcaggggtcttgtgcttcctgggtacaagtacctcggacccttcaacggactcgacaagggagagccggtcaacgaggcagacgcagcggccctcgagcacgacaaggcctacgaccagcagctcaaggccggtgacaacccctacctcaagtacaaccacgccgacgcggagttccagcagcggcttcagggcgacacatcgtttgggggcaacctcggcagagcagtcttccaggccaaaaagagggttcttgaacctcttggtctggttgagcaagcgggtgagacggctcctggaaagaagagaccgttgattgaatccccccagcagcccgactcctccacgggtatcggcaaaaaaggcaagcagccggctaaaaagagactcaattttggtcagactggcgactcagagtcagtccccgacccacaacctctcggagaacctccagcaacccccgctgctgtgggacctactacaatggcttcaggtggtggcgcaccaatggcagacaataacgaaggcgccgacggagtgggtaatgcctcaggaaattggcattgcgattccacatggctgggcgacagagtcatcaccaccagcacccgcacctgggccttgcccacctacaataaccacctctacaagcaaatctccagtgcttcaacgggggccagcaacgacaaccactacttcggctacagcaccccctgggggtattttgacttcaacagattccactgccacttttcaccacgtgactggcagcgactcatcaacaacaattggggattccggcccaagagactcaacttcaaactcttcaacatccaagtcaaggaggtcacgacgaatgatggcgtcacaaccatcgctaataaccttaccagcacggttcaagtcttctcggactcagactatcagctcccgtacgtgctcgggtcggctcacgagggctgcctcccgccgttcccagcagacgtcttcatggtgccacagtatggatacctcaccctgaacaacgggagtcaggcagtaggacgctcttcattttactgcctggagtactttccttctcagatgctgcgtaccggaaacaactttaccttcagctacacttttgaggacgttcctttccacagcagctacgctcacagccagagtctggaccgtctcatgaatcctctcatcgaccagtacctgtattacctgaacagaactcagaatcagtccggaagtgcccaaaacaaggacttgctgtttagccgggggtctccagctggcatgtctgttcagcccaaaaactggctacctggaccctgttatcggcagcagcgcgtttctaaaacaaaaacagacaacaacaacagcaactttacctggactggtgcttcaaaatataaccttaatgggcgtgaatctataatcaaccctggcactgctatggcctcacacaaagacgacaaagacaagttctttcccatgagcggtgtcatgatttttggaaaggagagcgccggagcttcaaacactgcattggacaatgtcatgatcacagacgaagaggaaatcaaagccactaaccccgtggccaccgaaagatttgggactgtggcagtcaatctccagagcagcagcacagaccctgcgaccggagatgtgcatgttatgggagccttacctggaatggtgtggcaagacagagacgtatacctgcagggtcccatttgggccaaaattcctcacacagatggacactttcacccgtctcctcttatgggcggctttggactcaagaacccgcctcctcagatcctcatcaaaaacacgcctgttcctgcgaatcctccggcggagttttcagctacaaagtttgcttcattcatcacccaatactccacaggacaagtgagtgtggaaattgaatgggagctgcagaaagaaaacagcaagcgctggaatcccgaagtgcagtacacatccaattatgcaaaatctgccaacgttgattttactgtggacaacaatggactttatactgagcctcgccccattggcacccgttacctcacccgtcccctgtaa

SEQ ID NO: 5192 - protein, 736 aa, Artificial Sequence
  Description of Artificial Sequence: Synthetic polypeptide
MAADGYLPDWLEDTLSEGIRQWWKLKPGPPPPKPAERHKDDSRGLVLPGYKYLGPFNGLDKGEPVNEADAAALEHDKAYDQQLKAGDNPYLKYNHADAEFQQRLQGDTSFGGNLGRAVFQAKKRVLEPLGLVEQAGETAPGKKRPLIESPQQPDSSTGIGKKGKQPAKKRLNFGQTGDSESVPDPQPLGEPPATPAAVGPTTMASGGGAPMADNNEGADGVGNASGNWHCDSTWLGDRVITTSTRTWALPTYNNHLYKQISSASTGASNDNHYFGYSTPWGYFDFNRFHCHFSPRDWQRLINNNWGFRPKRLNFKLFNIQVKEVTTNDGVTTIANNLTSTVQVFSDSDYQLPYVLGSAHEGCLPPFPADVFMVPQYGYLTLNNGSQAVGRSSFYCLEYFPSQMLRTGNNFTFSYTFEDVPFHSSYAHSQSLDRLMNPLIDQYLYYLNRTQNQSGSAQNKDLLFSRGSPAGMSVQPKNWLPGPCYRQQRVSKTKTDNNNSNFTWTGASKYNLNGRESIINPGTAMASHKDDKDKFFPMSGVMIFGKESAGASNTALDNVMITDEEEIKATNPVATERFGTVAVNLQSSSTDPATGDVHVMGALPGMVWQDRDVYLQGPIWAKIPHTDGHFHPSPLMGGFGLKNPPPQILIKNTPVPANPPAEFSATKFASFITQYSTGQVSVEIEWELQKENSKRWNPEVQYTSNYAKSANVDFTVDNNGLYTEPRPIGTRYLTRPL

SEQ ID NO: 5193 - DNA, 2211 bp, Artificial Sequence
  Description of Artificial Sequence: Synthetic polynucleotide
atggcttccgatggttatcttccagattggctcgaggacaacctctctgagggcatccgcgagtggtgggacttgaaacctggagccccgaaacccaaagccaaccagcaaaagcaggacgacggccggggtctggtgcttcctggctacaagtacctcggacccttcaacggactcgacaagggggagcccgtcaacgcggcggatgcagcggccctcgagcacgacaaggcctacgaccagcagctcagagcgggtgacaatccgtacctgcggtataaccacgccgacgccgagtttcaggagcgtctgcaagaagatacgtcttttgggggcaacctcgggcgagcagtcttccaggccaagaagagggttctcgaaccttttggtctggttgaggaaggtgctaagacggctcctggaaagaaacgtccggtagagcagtcgccacaagagccagactcctcctcgggcattggcaagacaggccagcagcccgctaaaaagagactcaattttggtcagactggcgactcagagtcagtccccgacccacaacctctcggagaacctccagcaacccccgctgctgtgggacctactacaatggcttcaggcggtggcgcaccaatggcagacaataacgaaggcgccgacggagtgggtaatgcctcaggaaattggcattgcgattccacatggctgggcgacagagtcatcaccaccagcacccgaacatgggccttgcccacctataacaaccacctctacaagcaaatctccagtgcttcaacgggggccagcaacgacaaccactacttcggctacagcaccccctgggggtattttgatttcaacagattccactgccatttctcaccacgtgactggcagcgactcatcaacaacaattggggattccggcccaagagactcaacttcaaactcttcaacatccaagtcaaggaggtcacgacgaatgatggcgtcacaaccatcgctaataaccttaccagcacggttcaagtcttctcggactcggagtaccagcttccgtacgtcctcggctctgcgcaccagggctgcctccctccgttcccggcggacgtgttcatgattccgcagtacggctacctaacgctcaacaatggcagccaggcagtgggacggtcatccttttactgcctggaatatttcccatcgcagatgctgagaacgggcaataactttaccttcagctacaccttcgaggacgtgcctttccacagcagctacgcgcacagccagagcctggaccggctgatgaatcctctcatcgaccagtacctgtattacctgaacagaactcagaatcagtccggaagtgcccaaaacaaggacttgctgtttagccgggggtctccagctggcatgtctgttcagcccaaaaactggctacctggaccctgttaccggcagcagcgcgtttctaaaacaaaaacagacaacaacaacagcaactttacctggactggtgcttcaaaatataaccttaatgggcgtgaatctataatcaaccctggcactgctatggcctcacacaaagacgacaaagacaagttctttcccatgagcggtgtcatgatttttggaaaggagagcgccggagcttcaaacactgcattggacaatgtcatgatcacagacgaagaggaaatcaaagccactaaccccgtggccaccgaaagatttgggactgtggcagtcaatctccagagcagcagcacagaccctgcgaccggagatgtgcatgttatgggagccttacctggaatggtgtggcaagacagagacgtatacctgcagggtcccatttgggccaaaattcctcacacagatggacactttcacccgtctcctcttatgggcggctttggacttaagcacccgcctcctcagatcctcatcaaaaacacgcctgttcctgcgaatcctccggcagagttttcggctacaaagtttgcttcattcatcacccagtattctactggccaagtcagcgtggagattgaatgggagctgcagaaagaaaacagcaaacgctggaatcccgaagtgcagtatacatctaactatgcaaaatctgccaacgttgatttcactgtggacaacaatggactttatactgagcctcgtcccattggcacccgttacctcacccgtcccctgtaa

SEQ ID NO: 5194 - protein, 736 aa, Artificial Sequence
  Description of Artificial Sequence: Synthetic polypeptide
MASDGYLPDWLEDNLSEGIREWWDLKPGAPKPKANQQKQDDGRGLVLPGYKYLGPFNGLDKGEPVNAADAAALEHDKAYDQQLRAGDNPYLRYNHADAEFQERLQEDTSFGGNLGRAVFQAKKRVLEPFGLVEEGAKTAPGKKRPVEQSPQEPDSSSGIGKTGQQPAKKRLNFGQTGDSESVPDPQPLGEPPATPAAVGPTTMASGGGAPMADNNEGADGVGNASGNWHCDSTWLGDRVITTSTRTWALPTYNNHLYKQISSASTGASNDNHYFGYSTPWGYFDFNRFHCHFSPRDWQRLINNNWGFRPKRLNFKLFNIQVKEVTTNDGVTTIANNLTSTVQVFSDSEYQLPYVLGSAHQGCLPPFPADVFMIPQYGYLTLNNGSQAVGRSSFYCLEYFPSQMLRTGNNFTFSYTFEDVPFHSSYAHSQSLDRLMNPLIDQYLYYLNRTQNQSGSAQNKDLLFSRGSPAGMSVQPKNWLPGPCYRQQRVSKTKTDNNNSNFTWTGASKYNLNGRESIINPGTAMASHKDDKDKFFPMSGVMIFGKESAGASNTALDNVMITDEEEIKATNPVATERFGTVAVNLQSSSTDPATGDVHVMGALPGMVWQDRDVYLQGPIWAKIPHTDGHFHPSPLMGGFGLKHPPPQILIKNTPVPANPPAEFSATKFASFITQYSTGQVSVEIEWELQKENSKRWNPEVQYTSNYAKSANVDFTVDNNGLYTEPRPIGTRYLTRPL

SEQ ID NO: 5195 - DNA, 2211 bp, Artificial Sequence
  Description of Artificial Sequence: Synthetic polynucleotide
atggctgctgatggttatcttccagattggctcgaggacactctctctgaaggaataagacagtggtggaagctcaaacctggcccaccaccaccaaagcccgcagagcggcataaggacgacagcaggggtcttgtgcttcctgggtacaagtacctcggacccttcaacggactcgacaagggagagccggtcaacgaggcagacgcagcggccctcgagcacgacaaggcctacgaccagcagctcaaggccggtgacaacccctacctcaagtacaaccacgccgacgcggagttccagcagcggcttcagggcgacacatcgtttgggggcaacctcggcagagcagtcttccaggccaaaaagagggttcttgaacctcttggtctggttgagcaagcgggtgagacggctcctggaaagaagagaccgttgattgaatccccccagcagcccgactcctccacgggtatcggcaaaaaaggcaagcagccggctaaaaagagactcaattttggtcagactggcgactcagagtcagtccccgacccacaacctctcggagaacctccagcaacccccgctgctgtgggacctactacaatggcttcaggtggtggcgcaccaatggcagacaataacgaaggcgccgacggagtgggtaatgcctcaggaaattggcattgcgattccacatggctgggcgacagagtcatcaccaccagcacccgcacctgggccttgcccacctacaataaccacctctacaagcaaatctccagtgcttcaacgggggccagcaacgacaaccactacttcggctacagcaccccctgggggtattttgacttcaacagattccactgccacttttcaccacgtgactggcagcgactcatcaacaacaattggggattccggcccaagagactcaacttcaaactcttcaacatccaagtcaaggaggtcacgacgaatgatggcgtcacaaccatcgctaataaccttaccagcacggttcaagtcttctcggactcagactatcagctcccgtacgtgctcgggtcggctcacgagggctgcctcccgccgttcccagcagacgtcttcatggtgccacagtatggatacctcaccctgaacaacgggagtcaggcagtaggacgctcttcattttactgcctggagtactttccttctcagatgctgcgtaccggaaacaactttaccttcagctacacttttgaggacgttcctttccacagcagctacgctcacagccagagtctggaccgtctcatgaatcctctcatcgaccagtacctgtattacctgaacagaactcagaatcagtccggaagtgcccaaaacaaggacttgctgtttagccgggggtctccaactggcatgtctgttcagcccaaaaactggctacctggaccctgttatcggcagcagcgcgtttctaaaacaaaaacagacaacaacaacagcaactttacctggactggtgcttcaaaatataaccttaatgggcgtgaatctataatcaaccctggcactgctatggcctcacacaaagacgacaaagacaagttctttcccatgagcggtgtcatgatttttggaaaggagagcgccggagcttcaaacactgcattggacaatgtcatgatcacagacgaagaggaaatcaaagccactaaccccgtggccactgaaagatttgggactgtggcagtcaatctccagagcagcagcacagaccctgcgaccggagatgtgcatgccatgggagccttacctggaatggtgtggcaagacagagacgtatacctgcagggtcctatttgggccaaaattcctcacacggatggacactttcacccgtctcctctcatgggcggctttggactcaagaacccgcctcctcagatcctcatcaaaaacacgcctgttcctgcgaatcctccggcggagttttcagctacaaagtttgcttcattcatcacccagtattccacaggacaagtgagcgtggagattgaatgggagctgcagaaagaaaacagcaaacgctggaatcccgaagtgcagtatacatctaactatgcaaaatctgccaacgttgatttcactgtggacaacaatggactttatactgagcctcgccccattggcacccgttacctcacccgtcccctgtaa

SEQ ID NO: 5196 - protein, 736 aa, Artificial Sequence
  Description of Artificial Sequence: Synthetic polypeptide
MAADGYLPDWLEDTLSEGIRQWWKLKPGPPPPKPAERHKDDSRGLVLPGYKYLGPFNGLDKGEPVNEADAAALEHDKAYDQQLKAGDNPYLKYNHADAEFQQRLQGDTSFGGNLGRAVFQAKKRVLEPLGLVEQAGETAPGKKRPLIESPQQPDSSTGIGKKGKQPAKKRLNFGQTGDSESVPDPQPLGEPPATPAAVGPTTMASGGGAPMADNNEGADGVGNASGNWHCDSTWLGDRVITTSTRTWALPTYNNHLYKQISSASTGASNDNHYFGYSTPWGYFDFNRFHCHFSPRDWQRLINNNWGFRPKRLNFKLFNIQVKEVTTNDGVTTIANNLTSTVQVFSDSDYQLPYVLGSAHEGCLPPFPADVFMVPQYGYLTLNNGSQAVGRSSFYCLEYFPSQMLRTGNNFTFSYTFEDVPFHSSYAHSQSLDRLMNPLIDQYLYYLNRTQNQSGSAQNKDLLFSRGSPTGMSVQPKNWLPGPCYRQQRVSKTKTDNNNSNFTWTGASKYNLNGRESIINPGTAMASHKDDKDKFFPMSGVMIFGKESAGASNTALDNVMITDEEEIKATNPVATERFGTVAVNLQSSSTDPATGDVHAMGALPGMVWQDRDVYLQGPIWAKIPHTDGHFHPSPLMGGFGLKNPPPQILIKNTPVPANPPAEFSATKFASFITQYSTGQVSVEIEWELQKENSKRWNPEVQYTSNYAKSANVDFTVDNNGLYTEPRPIGTRYLTRPL

SEQ ID NO: 5197 - DNA, 2211 bp, Artificial Sequence
  Description of Artificial Sequence: Synthetic polynucleotide
atggctgccgatggttatcttccagattggctcgaggacaacctctctgagggcattcgcgagtggtgggcgctgaaacctggagccccgaagcccaaagccaaccagcaaaagcaggacgacggccggggtctggtgcttcctggctacaagtacctcggacccttcaacggactcgacaagggggagcccgtcaacgcggcggatgcagcggccctcgagcacgacaaggcctacgaccagcagctcaaagcgggtgacaatccgtacctgcggtataaccacgccgacgccgagtttcaggagcgtctgcaagaagatacgtcttttgggggcaacctcgggcgagcagtcttccaggccaagaagcgggttctcgaacctctcggtctggttgaggaaggcgctaagacggctcctggaaagaaacgtccggtagagcaatcgccacaagagccagactcctcctcgggcatcggcaagacaggccagcagcccgctaaaaagagactcaattttggtcagactggcgactcagagtcagtccccgacccacaacctctcggagaacctccagcaacccccgctgctgtgggacctactacaatggcttcaggcggtggcgcaccaatggcagacaataacgaaggcgccgacggagtgggtaatgcctcaggaaattggcattgcgattccacatggctgggcgacagagtcatcaccaccagcacccgaacatgggccttgcccacctataacaaccacctctacaagcaaatctccagtgcttcgacgggggccagcaacgacaaccactacttcggctacagcaccccctgggggtattttgactttaacagattccactgccacttttcaccacgtgactggcagcgactcatcaacaacaactggggattccggcccaagagactcagcttcaagctcttcaacatccaggtcaaggaggtcacgacgaatgatggcgtcacaaccatcgctaataaccttaccagcacggttcaagtcttctcggactcggagtaccagcttccgtacgtcctcggctctgcgcaccagggctgcctccctccgttcccggcggacgtgttcatgattccgcaatacggctacctgacgctcaacaatggcagccaagccgtgggacgttcatccttttactgcctggaatatttcccttctcagatgctgagaacgggcaacaactttaccttcagctacacctttgaggaagtgcctttccacagcagctacgcgcacagccagagcctggaccggctgatgaatcctctcatcgatcaatacctgtattacctgaacagaactcaaaatcagtccggaagtgcccaaaacaaggacttgctgtttagccgtgggtctccagctggcatgtctgttcagcccaaaaactggctacctggaccctgttatcggcagcagcgcgtttctaaaacaaaaacagacaacaacaacagcaattttacctggactggtgcttcaaaatataacctcaatgggcgtgaatccatcatcaaccctggcactgctatggcctcacataaagacgacgaagacaagttctttcccatgagcggtgtcatgatttttggaaaagagagcgccggagcttcaaacactgcattggacaatgtcatgattacagacgaagaggaaattaaagccactaaccctgtggccaccgaaagatttgggaccgtggcagtcaatttccagagcagcagcacagaccctgcgaccggagatgtgcatgctatgggagcattacctggcatggtgtggcaagatagagacgtgtacctgcagggtcccatttgggccaaaattcctcacacagatggacactttcacccgtctcctcttatgggcggctttggactcaagaacccgcctcctcagatcctcatcaaaaacacgcctgttcctgcgaatcctccggcggagttttcagctacaaagtttgcttcattcatcacccaatactccacaggacaagtgagcgtggagattgaatgggagctgcagaaagaaaacagcaaacgctggaatcccgaagtgcagtatacatctaactatgcaaaatctgccaacattgatttcactgtggacaacaatggactttatactgagcctcgccccattggcacccgttacctcacccgtccccagtaa

SEQ ID NO: 5198 - protein, 736 aa, Artificial Sequence
  Description of Artificial Sequence: Synthetic polypeptide
MAADGYLPDWLEDNLSEGIREWWALKPGAPKPKANQQKQDDGRGLVLPGYKYLGPFNGLDKGEPVNAADAAALEHDKAYDQQLKAGDNPYLRYNHADAEFQERLQEDTSFGGNLGRAVFQAKKRVLEPLGLVEEGAKTAPGKKRPVEQSPQEPDSSSGIGKTGQQPAKKRLNFGQTGDSESVPDPQPLGEPPATPAAVGPTTMASGGGAPMADNNEGADGVGNASGNWHCDSTWLGDRVITTSTRTWALPTYNNHLYKQISSASTGASNDNHYFGYSTPWGYFDFNRFHCHFSPRDWQRLINNNWGFRPKRLSFKLFNIQVKEVTTNDGVTTIANNLTSTVQVFSDSEYQLPYVLGSAHQGCLPPFPADVFMIPQYGYLTLNNGSQAVGRSSFYCLEYFPSQMLRTGNNFTFSYTFEEVPFHSSYAHSQSLDRLMNPLIDQYLYYLNRTQNQSGSAQNKDLLFSRGSPAGMSVQPKNWLPGPCYRQQRVSKTKTDNNNSNFTWTGASKYNLNGRESIINPGTAMASHKDDEDKFFPMSGVMIFGKESAGASNTALDNVMITDEEEIKATNPVATERFGTVAVNFQSSSTDPATGDVHAMGALPGMVWQDRDVYLQGPIWAKIPHTDGHFHPSPLMGGFGLKNPPPQILIKNTPVPANPPAEFSATKFASFITQYSTGQVSVEIEWELQKENSKRWNPEVQYTSNYAKSANIDFTVDNNGLYTEPRPIGTRYLTRPQ

SEQ ID NO: 5199 - DNA, 2211 bp, Artificial Sequence
  Description of Artificial Sequence: Synthetic polynucleotide
atggctgccgatggttatcttccagattggctcgaggacaacctctctgagggcattcgcgagtggtgggacttgaaacctggagccccgaaacccaaagccaaccagcaaaagcaggacgacggccggggtctggtgcttcctggctacaagtacctcggacccttcaacggactcgacaagggggagcccgtcaacgcggcggatgcagcggccctcgagcacgacaaggcctacgaccagcagctcaaagcgggtgacaatccgtaccttcggtataaccacgccgacgccgagtttcaggagcgtctgcaagaagatacgtcttttgggggcaacctcgggcgagcagtcttccaggccaaaaagagggttctcgaacctctcggtctggttgaggaagcggctaagacggctcctggaaagaaacgtccggtagagcagtcgccacaagagccagactcctcctcgggcattggcaagacaggccagcagcccgctaaaaagagactcaattttggtcagactggcgactcagagtcagtccccgacccacaacctctcggagaacctcccgcagccccctcaggtgtgggatctcttacaatggcttcaggtggtggcgcaccaatggcagacaataacgaaggcgccgacggagtgggtaatgcctcaggaaattggcattgcgattccacatggctgggcgacagagtcatcaccaccagcacccgcacctgggccttgcccacctacaataaccacctctacaagcaaatctccagtgcttcaacgggggccagcaacgacaaccactacttcggctacagcaccccctgggggtattttgacttcaacagattccactgccacttttcaccacgtgactggcaaagactcatcaacaacaattggggattccggcccaagagactcaacttcaagctcttcaacatccaagtcaaggaggtcacgacgaatgatggcgtcacgaccatcgctaataaccttaccagcacggttcaagtcttctcggactcggagtaccagttgccgtacgtcctcggctctgcgcaccagggctgcctccctccgttcccggcggacgtgttcatgattccgcagtacggctacctaacgctcaacaatggcagccaggcagtgggacggtcatccttttactgcctggaatatttcccatcgcagatgctgagaacgggcaacaactttaccttcagctacacctttgaggaagtgcctttccacagcagctacgcgcacagccagagcctggaccggctgatgaatcctctcatcgaccagtacctgtattacctgaacagaactcaaaatcagtccggaagtgcccaaaacaaggacttgctgtttagccgtgggtctccagctggcatgtctgttcagcccaaaaactggctacctggaccctgttaccggcagcagtgcgtttctaaaacaaaaacagacaacaacaacagcaactttacctggactggtgcttcaaaatataaccttaatgggcgtgaatctataatcaaccctggcactgctatggcctcacacaaagacgacaaagacaagttctttcccatgagcggtgtcatgatttttggaaaggagagcgccggagcttcaaacactgcattggacaatgtcatgatcacagacgaagaggaaatcaaagccactaaccccgtggccaccgaaagatttgggactgtggcagtcaatctccagagcagcagcacagaccctgcgaccggagatgtgcatgttatgggagccttacctggaatggtgtggcaagacagagacgtatacctgcagggtcctatttgggccaaaattcctcacacagatggacactttcacccgtctcctcttatgggcggctttggactcaagaacccgcctcctcagatcctcatcaaaaacacgcctgttcctgcgaatcctccggcggagttttcagctacaaagtttgcttcattcatcacccaatactccacaggacaagtgagcgtggagattgaatgggagctgcagaaagaaaacagcaagcgctggaatcccgaagtgcagtacacatccaattatgcaaaatctgccaacgttgatttcactgtggacaacaatggactttatactgagcctcgccccattggcacccgttacctcacccgtcccctgtaa

SEQ ID NO: 5200 - protein, 736 aa, Artificial Sequence
  Description of Artificial Sequence: Synthetic polypeptide
MAADGYLPDWLEDNLSEGIREWWDLKPGAPKPKANQQKQDDGRGLVLPGYKYLGPFNGLDKGEPVNAADAAALEHDKAYDQQLKAGDNPYLRYNHADAEFQERLQEDTSFGGNLGRAVFQAKKRVLEPLGLVEEAAKTAPGKKRPVEQSPQEPDSSSGIGKTGQQPAKKRLNFGQTGDSESVPDPQPLGEPPAAPSGVGSLTMASGGGAPMADNNEGADGVGNASGNWHCDSTWLGDRVITTSTRTWALPTYNNHLYKQISSASTGASNDNHYFGYSTPWGYFDFNRFHCHFSPRDWQRLINNNWGFRPKRLNFKLFNIQVKEVTTNDGVTTIANNLTSTVQVFSDSEYQLPYVLGSAHQGCLPPFPADVFMIPQYGYLTLNNGSQAVGRSSFYCLEYFPSQMLRTGNNFTFSYTFEEVPFHSSYAHSQSLDRLMNPLIDQYLYYLNRTQNQSGSAQNKDLLFSRGSPAGMSVQPKNWLPGPCYRQQCVSKTKTDNNNSNFTWTGASKYNLNGRESIINPGTAMASHKDDKDKFFPMSGVMIFGKESAGASNTALDNVMITDEEEIKATNPVATERFGTVAVNLQSSSTDPATGDVHVMGALPGMVWQDRDVYLQGPIWAKIPHTDGHFHPSPLMGGFGLKNPPPQILIKNTPVPANPPAEFSATKFASFITQYSTGQVSVEIEWELQKENSKRWNPEVQYTSNYAKSANVDFTVDNNGLYTEPRPIGTRYLTRPL

SEQ ID NO: 5201 - DNA, 2211 bp, Artificial Sequence
  Description of Artificial Sequence: Synthetic polynucleotide
atggctgccgatggttatcttccagattggctcgaggacaacctctctgagggcattcgcgaatggtgggacttgaaacctggagccccgaaacccaaagtcaaccagcaaaagcaggacaacgctcggggtcttgtgcttccgggttacaaatacctcggacccttcaacggactcgacaagggggagcccgtcaacgcggcggacgcagcggccctcgagcacgacaaggcctacgaccagcagctcaaagcgggtgacaatccgtaccttcggtataaccacgccgacgccgagtttcaggagcgtctgcaagaagatacgtcttttgggggcaaccttggacgagcagtcttccaggccaagaagagggttctcgaaccttttggtctggttgaggaaggtgctaagacggctcctggaaagaaacgtccggtagagcagtcgccacaagagccagactcctcctcgggcattggcaagacaggccagcagcccgctaaaaagagactcaattttggtcagactggcgactcagagtcagtccccgacccacaacctctcggagaacctccagcaacccccgctgctgtgggacctactacaatggcttcaggcggtggcgcaccaatggcagacaataacgaaggcgccgacggagtgggtaatgcctcaggaaattggcattgcgattccacatggctgggcgacagagtcatcaccaccagcacccgcacctgggccttgcccacctacaataaccacctctacaagcaaatctccagtgcttcaacgggggccagcaacgacaaccactacttcggctacagcaccccctgggggtattttgacttcaacagattccactgccacttttcaccacgtgactggcaaagactcatcaacaacaattggggattccggcccaagagactcaacttcaagctcttcaacatccaagtcaaggaggtcacgacgaatgatggcgtcacgaccatcgctaataaccttaccagcacggttcaagtcttctcggactcggagtaccagttgccgtacgtcctcggctctgcgcaccagggctgcctccctccgttcccggcggacgtgttcatgattccgcaatacggctacctgacgctcaacaatggcagccaggcagtgggacggtcatccttttactgcctggaatatttcccatcgcagatgctgagaacgggcaataactttaccttcagctacacttttgaggacgttcctttccacagcagctacgctcacagccagagcctggaccggctgatgaatcctctcatcgaccagtacctgtattacctgaacagaactcagaatcagtccggaagtgcccaaaacaaggacttgctgtttagccgtgggtctccaactggcatgtctgttcagcccaaaaactggctacctggaccctgttatcggcagcagcgcgtttctaaaacaaaaacagacaacaacaacagcaactttacctggactggtgcttcaaaatataaccttaatgggcgtgaatctataatcaaccctggcactgctatggcctcacacaaagacgacgaagacaagttctttcccatgagcggtgtcatgatttttggaaaggagagcgccggagcttcaaacactgcattggacaatgtcatgatcacagacgaagaggaaatcaaagccactaaccccgtggccactgaaagatttgggactgtggcagtcaatctccagagcagcagcacagaccctgcgaccggagatgtgcatgccatgggagccttacctggaatggtgtggcaagacagagacgtatacctgcagggtcctatttgggccaaaattcctcacacggatggacactttcacccgtctcctctcatgggcggctttggacttaagcacccgcctcctcagatcctcatcaaaaacacgcctgttcctgcgaatcctccggcagagttttcggctacaaagtttgcttcattcatcacccagtattccacaggacaagtgagcgtggagattgaatgggagctgcagaaagaaaacagcaaacgctggaatcccgaagtgcagtatacatctaactatgcaaaatctgccaacgttgatttcactgtggacaacaatggactttatactgagcctcgccccattggcacccgttacctcacccgtcccctgtaa

SEQ ID NO: 5202 - protein, 736 aa, Artificial Sequence
  Description of Artificial Sequence: Synthetic polypeptide
MAADGYLPDWLEDNLSEGIREWWDLKPGAPKPKVNQQKQDNARGLVLPGYKYLGPFNGLDKGEPVNAADAAALEHDKAYDQQLKAGDNPYLRYNHADAEFQERLQEDTSFGGNLGRAVFQAKKRVLEPFGLVEEGAKTAPGKKRPVEQSPQEPDSSSGIGKTGQQPAKKRLNFGQTGDSESVPDPQPLGEPPATPAAVGPTTMASGGGAPMADNNEGADGVGNASGNWHCDSTWLGDRVITTSTRTWALPTYNNHLYKQISSASTGASNDNHYFGYSTPWGYFDFNRFHCHFSPRDWQRLINNNWGFRPKRLNFKLFNIQVKEVTTNDGVTTIANNLTSTVQVFSDSEYQLPYVLGSAHQGCLPPFPADVFMIPQYGYLTLNNGSQAVGRSSFYCLEYFPSQMLRTGNNFTFSYTFEDVPFHSSYAHSQSLDRLMNPLIDQYLYYLNRTQNQSGSAQNKDLLFSRGSPTGMSVQPKNWLPGPCYRQQRVSKTKTDNNNSNFTWTGASKYNLNGRESIINPGTAMASHKDDEDKFFPMSGVMIFGKESAGASNTALDNVMITDEEEIKATNPVATERFGTVAVNLQSSSTDPATGDVHAMGALPGMVWQDRDVYLQGPIWAKIPHTDGHFHPSPLMGGFGLKHPPPQILIKNTPVPANPPAEFSATKFASFITQYSTGQVSVEIEWELQKENSKRWNPEVQYTSNYAKSANVDFTVDNNGLYTEPRPIGTRYLTRPL

SEQ ID NO: 5203 - DNA, 2208 bp, Artificial Sequence
  Description of Artificial Sequence: Synthetic polynucleotide
  modified_base (955)..(955): a, c, t or g
  modified_base (971)..(972): a, c, t or g
  modified_base (981)..(981): a, c, t or g
  modified_base (986)..(986): a, c, t or g
  modified_base (1235)..(1235): a, c, t or g
  modified_base (1694)..(1696): a, c, t or g
  modified_base (1698)..(1698): a, c, t or g
  modified_base (1763)..(1765): a, c, t or g
  modified_base (1778)..(1778): a, c, t or g
  modified_base (2204)..(2204): a, c, t or g
atggctgccgatggttatcttccagattggctcgaggacaacctctctgagggcattcgcgaatggtgggacttgaaacctggagccccgaaacccaaagtcaaccagcaaaagcaggacaacgctcggggtcttgtgcttccgggttacaaatacctcggacccttcaacggactcgacaagggggagcccgtcaacgcggcggacgcagcggccctcgagcacgacaaggcctacgaccagcagctcaaagcgggtgacaatccgtaccttcggtataaccacgccgacgccgagtttcaggagcgtctgcaagaagatacgtcttttgggggcaaccttggacgagcagtcttccaggccaagaagagggttctcgaaccttttggtctggttgaggaaggtgctaagacggctcctggaaagaaacgtccggtagagcagtcgccacaagagccagactcctcctcgggcattggcaagacaggccagcagcccgctaaaaagagactcaattttggtcagactggcgactcagagtcagtccccgacccacaacctctcggagaacctccagcaacccccgctgctgtgggacctactacaatggcttcaggcggtggcgcaccaatggcagacaataacgaaggcgccgacggagtgggtaatgcctcaggaaattggcattgcgattccacatggctgggcgacagagtcatcaccaccagcacccgaacatgggccttgcccacctataacaaccacctctacaagcaaatctccagtgcttcaacgggggccagcaacgacaaccactacttcggctacagcaccccctgggggtattttgatttcaacagattccactgccacttttcaccacgtgactggcagcgactcatcaataacaattggggattccggcccaagagactcaacttcaaactcttcaacntccaagtcaaggaggnnacgacgaangatgncgtcacaaccatcgctaataaccttaccagcacggttcaagtcttctcggactcggagtaccagcttccgtacgtcctcggctctgcgcaccagggctgcctccctccgttcccggcggacgtgttcatgattccgcaatacggctacctgacgctcaacaatggcagccaggcagtgggacggtcatccttttactgcctggaatatttcccatcgcagatgctgagaacgggcaataactttacctncagctacacttttgaggacgttcctttccacagcagctacgctcacagccagagcctggaccggctgatgaatcctctcatcgaccagtacctgtattacctgaacagaactcagaatcagtccggaagtgcccaaaacaaggacttgctgtttagccgtgggtctccaactggcatgtctgttcagcccaaaaactggctacctggaccctgttatcggcagcagcgcgtttctaaaacaaaaacagacaacaacaacagcaactttacctggactggtgcttcaaaatataaccttaatgggcgtgaatctataatcaaccctggcactgctatggcctcacacaaagacgacgaagacaagttctttcccatgagcggtgtcatgatttttggaaaggagagcgccggagcttcaaacactgcattggacaatgtcatgatcacagacgaagagannncnaagccactaaccccgtggccactgaaagatttgggactgtggcagtcaatctccaagcagcacannnaccctgcgaccgnagatgtgcatgccatgggagccttacctggaatggtgtggcaagacagagacgtatacctgcagggtcctatttgggccaaaattcctcacacggatggacactttcacccgtctcctctcatgggcggctttggacttaagcacccgcctcctcagatcctcatcaaaaacacgcctgttcctgcgaatcctccggcagagttttcggctacaaagtttgcttcattcatcacccagtattccacaggacaagtgagcgtggagattgaatgggagctgcagaaagaaaacagcaaacgctggaatcccgaagtgcagtatacatctaactatgcaaaatctgccaacgttgatttcactgtggacaacaatggactttatactgagcctcgccccattggcacccgttacctcacccgtccccngtaa

SEQ ID NO: 5204 - protein, 723 aa, Artificial Sequence
  Description of Artificial Sequence: Synthetic polypeptide
MAADGYLPDWLEDNLSEGIREWWDLKPGAPKPKVNQQKQDNARGLVLPGYKYLGPFNGLDKGEPVNAADAAALEHDKAYDQQLKAGDNPYLRYNHADAEFQERLQEDTSFGGNLGRAVFQAKKRVLEPFGLVEEGAKTAPGKKRPVEQSPQEPDSSSGIGKTGQQPAKKRLNFGQTGDSESVPDPQPLGEPPATPAAVGPTTMASGGGAPMADNNEGADGVGNASGNWHCDSTWLGDRVITTSTRTWALPTYNNHLYKQISSASTGASNDNHYFGYSTPWGYFDFNRFHCHFSPRDWQRLINNNWGFRPKRLNFKLFNQVKETTDVTTIANNLTSTVQVFSDSEYQLPYVLGSAHQGCLPPFPADVFMIPQYGYLTLNNGSQAVGRSSFYCLEYFPSQMLRTGNNFTSYTFEDVPFHSSYAHSQSLDRLMNPLIDQYLYYLNRTQNQSGSAQNKDLLFSRGSPTGMSVQPKNWLPGPCYRQQRVSKTKTDNNNSNFTWTGASKYNLNGRESIINPGTAMASHKDDEDKFFPMSGVMIFGKESAGASNTALDNVMITDEEATNPVATERFGTVAVNLQSSPATDVHAMGALPGMVWQDRDVYLQGPIWAKIPHTDGHFHPSPLMGGFGLKHPPPQILIKNTPVPANPPAEFSATKFASFITQYSTGQVSVEIEWELQKENSKRWNPEVQYTSNYAKSANVDFTVDNNGLYTEPRPIGTRYLTRP

SEQ ID NO: 5205 - DNA, 2208 bp, Artificial Sequence
  Description of Artificial Sequence: Synthetic polynucleotide
atggctgccgatggttatcttccagattggctcgaggacactctctctgaaggaataagacagtggtggaagctcaaacctggcccaccaccaccaaagcccgcagagcggcataaggacgacagcaggggtcttgtgcttcctgggtacaagtacctcggacccttcaacggactcgacaagggagagccggtcaacgaggcagacgccgcggccctcgagcacgacaaagcctatgaccggcagctcgacagcggagacaacccgtacctcaagtacaaccacgccgacgcggagtttcaggagcgccttaaagaagatacgtcttttgggggcaacctcggacgagcagtcttccaggcgaaaaagagggttcttgaacctctgggcctggttgaggaacctgttaagacggctccgggaaaaaagaggccggtagagcactctcctgtggagccagactcctcctcgggaaccggaaaggcgggtcagcagcctgcaagaaaaagattgaattttggtcagactggagacgcagactcagtacctgacccccagcctctcggacagccaccagcagccccctctggtctgggaactaatacgatggctacaggcagtggcgcaccaatggcagacaataacgagggcgccgacggagtgggtaattcctcgggaaattggcattgcgattccacatggatgggcgacagagtcatcaccaccagcacccgaacctgggccctgcccacctacaacaaccacctctacaaacaaatttccagccaatcaggagcctcgaacgacaatcactactttggctacagcaccccttgggggtattttgacttcaacagattccactgccacttttcaccacgtgactggcaaagactcatcaacaacaactggggattccgacccaagagactcaagttcaagctctttaacattcaagtcaaagaggtcacgcagaatgacggtacgacgacgattgccaataaccttaccagcacggttcaggtgtttactgactcggagtaccagctcccgtacgtcctcggctcggcgcatcaaggatgcctcccgccgttcccagcagacgtcttcatggtgccacagtatggatacctcaccctgaacaacgggagtcaggcagtaggacgctcttcattttactgcctggagtactttccttctcagatgctgcgtaccggtaacaactttaccttcagctacacttttgaggacgttcctttccacagcagctacgctcacagccagagtctggaccgtctcatgaatcctctcatcgaccagtacctgtattacttgagcagaacagacgctccaagtggaaccaccacgcagtcaaggcttcagttttctcaggccggagcgagtgacattcgggaccagtctaggaactggcttcctggaccctgttaccgccagcagcgagtatcaaagacatctgcggataacaacaacagtgaatactcgtggactggagctaccaagtaccacctcaatggcagagactctctggtgaatccgggcccggccatggcaagccacaaggacgatgaagaaaagttttttcctcagagcggggttctcatctttgggaagcaaggctcagagaaaacaagtgtggacattgaaaaggtcatgattacagacgaagaggaaatcaggacaaccaatcccgtggctacggagcagtatggttctgtatctaccaacctccagagaggcaacagacaagcagctaccgcagatgtcaacacacaaggcgttcttccaggcatggtctggcaggacagagatgtgtaccttcaggggcccatctgggcaaagattccacacacggacggacattttcacccctctcccctcatgggtggattcggacttaaacaccctcctccacagattctcatcaagaacaccccggtacctgcgaatccttcgaccaccttcagtgcggcaaagtttgcttccttcatcacacagtactccacgggacaggtcagcgtggagatcgagtgggagctgcagaaggaaaacagcaaacgctggaatcccgaagttcagtacacttccaactacaacaagtctgttaatgtggactttactgtggacactaatggcgtgtattcagagcctcgccccattggcaccagatacctgactcgtaatctgtaa

SEQ ID NO: 5206 - protein, 735 aa, Artificial Sequence
  Description of Artificial Sequence: Synthetic polypeptide
MAADGYLPDWLEDTLSEGIRQWWKLKPGPPPPKPAERHKDDSRGLVLPGYKYLGPFNGLDKGEPVNEADAAALEHDKAYDRQLDSGDNPYLKYNHADAEFQERLKEDTSFGGNLGRAVFQAKKRVLEPLGLVEEPVKTAPGKKRPVEHSPVEPDSSSGTGKAGQQPARKRLNFGQTGDADSVPDPQPLGQPPAAPSGLGTNTMATGSGAPMADNNEGADGVGNSSGNWHCDSTWMGDRVITTSTRTWALPTYNNHLYKQISSQSGASNDNHYFGYSTPWGYFDFNRFHCHFSPRDWQRLINNNWGFRPKRLKFKLFNIQVKEVTQNDGTTTIANNLTSTVQVFTDSEYQLPYVLGSAHQGCLPPFPADVFMVPQYGYLTLNNGSQAVGRSSFYCLEYFPSQMLRTGNNFTFSYTFEDVPFHSSYAHSQSLDRLMNPLIDQYLYYLSRTDAPSGTTTQSRLQFSQAGASDIRDQSRNWLPGPCYRQQRVSKTSADNNNSEYSWTGATKYHLNGRDSLVNPGPAMASHKDDEEKFFPQSGVLIFGKQGSEKTSVDIEKVMITDEEEIRTTNPVATEQYGSVSTNLQRGNRQAATADVNTQGVLPGMVWQDRDVYLQGPIWAKIPHTDGHFHPSPLMGGFGLKHPPPQILIKNTPVPANPSTTFSAAKFASFITQYSTGQVSVEIEWELQKENSKRWNPEVQYTSNYNKSVNVDFTVDTNGVYSEPRPIGTRYLTRNL

SEQ ID NO: 5207 - DNA, 2208 bp, Artificial Sequence
  Description of Artificial Sequence: Synthetic polynucleotide
atggctgccgatggttatcttccagattggctcgaggacactctctctgaaggaataagacagtggtggaagctcaaacctggcccaccaccaccaaagcccgcagagcggcataaggacgacagcaggggtcttgtgcttcctgggtacaagtacctcggacccttcaacggactcgacaagggagagccggtcaacgaggcagacgccgcggccctcgagcacgacaaagcctatgaccggcagctcgacagcggagacaacccgtacctcaagtacaaccacgccgacgcggagtttcaggagcgccttaaagaagatacgtcttttgggggcaacctcggacgagcagtcttccaggcgaaaaagagggttcttgaacctctgggcctggttgaggaacctgttaagacggctccgggaaaaaagaggccggtagagcactctcctgtggagccagactcctcctcgggaaccggaaaggcgggccagcagcctgcaagaaaaagattgaattttggtcagactggagacgcaaactcagtacctgacccccagcctctcggacagccaccagcagccccctctggtctgggaactaatacgatggctacaggcagtggcgcaccaatggcagacaataacgagggcgccgacggagtgggtaattcctcgggaaattggcattgcgattccacatggatgggcgacagagtcatcaccaccagcacccgaacctgggccctgcccacctacaacaaccacctctacaaacaaatttccagccaatcaggagcctcgaacgacaatcactactttggctacagcaccccttgggggtattttgacttcaacagattccactgccacttttcaccacgtgactggcaaagactcatcaacaacaactggggattccgacccaagagactcaagttcaagctctttaacattcaagtcaaagaggtcacgcagaatgacggtacgacgacgattgccaataaccttaccagcacggttcaggtgtttactgactcggagtaccagctcccgtacgtcctcggctcggcgcatcaaggatgcctcccgccgttcccagcagacgtcttcatggtgccacagtatggatacctcaccctgaacaacgggagtcgggcagtaggacgctcttcattttactgcctggagtactttccttctcagatgctgcgtaccggtaacaactttaccttcagctacacttttgaggacgttcctttccacagcagctacgctcacagccagagtctggaccgtctcatgaatcctctcatcgaccagtacctgtattacttgagcagaacagacactccaagtggaaccaccacgcagtcaaggcttcagttttctcaggccggagcgagtgacattcgggaccagtctaggaactggcttcctggaccctgttaccgccagcagcgagtatcaaagacatctgcggataacaacaacagtgaatactcgtggactggagctaccaagtaccacctcaatggcagagactctctggtgaatccgggcccggccatggcaagccacaaggacgatgaagaaaagttttttcctcagagcggggttctcatctttgggaagcaaggctcagagaaaacaagtgtggacattgaaaaggtcatgattacagacgaagaggaaatcaggacgaccaatcccgtggctacggagcagtatggttctgtatctaccaacctccagagaggcaacagacaagcagctaccgcagatgtcaacacacaaggcgttcttccaggcatggtctggcaggacagagatgtgtaccttcaggggcccatctgggcaaagattccacacacggacggacattttcacccctctcccctcatgggtggattcggacttaaacaccctcctccacagattctcatcaagaacaccccggtacctgcgaatccttcgaccaccttcagtgcggcaaagtttgcttccttcatcacacagtactccacgggacaggtcagcgtggagatcgagtgggagctgcagaaggaaaacagcaaacgctggaatcccgaagttcagtacacttccaactacaacaagtctgttaatgtggactttactgtggacactaatggcgtgtatacagagcctcgccccattggcaccagatacctgactcgtaatctgtaa

SEQ ID NO: 5208 - protein, 735 aa, Artificial Sequence
  Description of Artificial Sequence: Synthetic polypeptide
MAADGYLPDWLEDTLSEGIRQWWKLKPGPPPPKPAERHKDDSRGLVLPGYKYLGPFNGLDKGEPVNEADAAALEHDKAYDRQLDSGDNPYLKYNHADAEFQERLKEDTSFGGNLGRAVFQAKKRVLEPLGLVEEPVKTAPGKKRPVEHSPVEPDSSSGTGKAGQQPARKRLNFGQTGDANSVPDPQPLGQPPAAPSGLGTNTMATGSGAPMADNNEGADGVGNSSGNWHCDSTWMGDRVITTSTRTWALPTYNNHLYKQISSQSGASNDNHYFGYSTPWGYFDFNRFHCHFSPRDWQRLINNNWGFRPKRLKFKLFNIQVKEVTQNDGTTTIANNLTSTVQVFTDSEYQLPYVLGSAHQGCLPPFPADVFMVPQYGYLTLNNGSRAVGRSSFYCLEYFPSQMLRTGNNFTFSYTFEDVPFHSSYAHSQSLDRLMNPLIDQYLYYLSRTDTPSGTTTQSRLQFSQAGASDIRDQSRNWLPGPCYRQQRVSKTSADNNNSEYSWTGATKYHLNGRDSLVNPGPAMASHKDDEEKFFPQSGVLIFGKQGSEKTSVDIEKVMITDEEEIRTTNPVATEQYGSVSTNLQRGNRQAATADVNTQGVLPGMVWQDRDVYLQGPIWAKIPHTDGHFHPSPLMGGFGLKHPPPQILIKNTPVPANPSTTFSAAKFASFITQYSTGQVSVEIEWELQKENSKRWNPEVQYTSNYNKSVNVDFTVDTNGVYTEPRPIGTRYLTRNL

SEQ ID NO: 5209 - DNA, 2211 bp, Artificial Sequence
  Description of Artificial Sequence: Synthetic polynucleotide
atggctgccgatggttatcttccagattggctcgaggacactctctctgaaggaataagacagtggtggaagctcaaacctggcccaccaccaccaaagcccgcagagcggcataaggacgacagcaggggtcttgtgcttcctgggtacaagtacctcggacccttcaacggactcgacaagggagagccggtcaacgaggcagacgccgcggccctcgagcacgacaaggcctacgaccagcagctcaaagcgggtgacaatccgtacctgcggtataaccacgccgacgccgagtttcaggagcgtctgcaagaagatacgtcttttgggggcaacctcgggcgagcagtcttccaggccaagaagcgggttctcgaacctctcggtctggttgaggaaggcgctaagacggctcctggaaagaaacgtccggtagagcagtcgccacaagagccagactcctcctcgggcatcggcaagacaggccagcagcccgctaaaaagagactcaattttggtcagactggcgactcagagtcagtccccgacccacaacctctcggagaacctccagcaacccccgctgctgtgggacctactacaatggcttcaggcggtggcgcaccaatggcagacaataacgaaggcgccgacggagtgggtaatgcctcaggaaattggcattgcgattccacatggctgggcgacagagtcatcaccaccagcacccgaacatgggccttgcccacctataacaaccacctctacaagcaaatctccagtgcttcgacgggggccagcaacgacaaccactacttcggctacagcaccccctgggggtattttgactttaacagattccactgccacttttcaccacgtgactggcagcgactcatcaacaataactggggattccggcccaagagactcagcttcaagctcttcaacatccaggtcaaggaggtcacgacgaatgatggcgtcacaaccatcgctaataaccttaccagcacggttcaagtcttctcggactcggagtaccagcttccgtacgtcctcggctctgcgcaccagggctgcctccctccgttcccggcggacgtgttcatgattccgcaatacggctacctgacgctcaacaatggcagccaagccgtgggacgttcatccttttactgcctggaatatttcccttctcagatgctgagaacgggcaacaactttaccttcagctacacctttgaggaagtgcctttccacagcagctacgcgcacagccagagcctggaccggctgatgaatcctctcatcgatcaatacctgtattacctgaacagaactcaaaatcagtccggaagtgcccaaaacaaggacttgctgtttagccgtgggtctccagctggcatgtctgttcagcccaaaaactggctacctggaccctgttatcggcagcagcgcgtttctaaaacaaaaacagacaacaacaacagcaattttacctggactggtgcttcaaaatataacctcaatgggcgtgaatccatcatcaaccctggcactgctatggcctcacacaaagacgacgaagacaagttctttcccatgagcggtgtcatgatttttggaaaagagagcgccggagcttcaaacactgcattggacaatgtcatgattacggacgaagaggaaattaaagccactaaccctgtggccaccgaaagatttgggaccgtggcagtcaatttccagagcagcagcacagaccctgcgaccggagatgtgcatgctatgggagcattacctggcatggtgtggcaagatagagacgtgtacctgcagggtcccatttgggccaaaattcctcacacagatggacactttcacccgtctcctcttatgggcggctttggactcaagaacccgcctcctcagatcctcatcaaaaacacgcctgttcctgcgaatcctccggcggagttttcagctacaaagtttgcttcattcatcactcaatactccacaggacaagtgagcgtggaaattgaatgggagctgcagaaagaaaacagcaaacgctggaatcccgaagtgcagtatacatctaactatgcaaaatctgccaacgttgatttcactgtggacaacaatggactttatactgagcctcgccccattggcacccgttacctcacccgtcccctgtaa

SEQ ID NO: 5210 - protein, 736 aa, Artificial Sequence
  Description of Artificial Sequence: Synthetic polypeptide
MAADGYLPDWLEDTLSEGIRQWWKLKPGPPPPKPAERHKDDSRGLVLPGYKYLGPFNGLDKGEPVNEADAAALEHDKAYDQQLKAGDNPYLRYNHADAEFQERLQEDTSFGGNLGRAVFQAKKRVLEPLGLVEEGAKTAPGKKRPVEQSPQEPDSSSGIGKTGQQPAKKRLNFGQTGDSESVPDPQPLGEPPATPAAVGPTTMASGGGAPMADNNEGADGVGNASGNWHCDSTWLGDRVITTSTRTWALPTYNNHLYKQISSASTGASNDNHYFGYSTPWGYFDFNRFHCHFSPRDWQRLINNNWGFRPKRLSFKLFNIQVKEVTTNDGVTTIANNLTSTVQVFSDSEYQLPYVLGSAHQGCLPPFPADVFMIPQYGYLTLNNGSQAVGRSSFYCLEYFPSQMLRTGNNFTFSYTFEEVPFHSSYAHSQSLDRLMNPLIDQYLYYLNRTQNQSGSAQNKDLLFSRGSPAGMSVQPKNWLPGPCYRQQRVSKTKTDNNNSNFTWTGASKYNLNGRESIINPGTAMASHKDDEDKFFPMSGVMIFGKESAGASNTALDNVMITDEEEIKATNPVATERFGTVAVNFQSSSTDPATGDVHAMGALPGMVWQDRDVYLQGPIWAKIPHTDGHFHPSPLMGGFGLKNPPPQILIKNTPVPANPPAEFSATKFASFITQYSTGQVSVEIEWELQKENSKRWNPEVQYTSNYAKSANVDFTVDNNGLYTEPRPIGTRYLTRPL

SEQ ID NO: 5211 - protein, 735 aa, Artificial Sequence
  Description of Artificial Sequence: Synthetic polypeptide
MAADGYLPDWLEDTLSEGIRQWWKLKPGPPPPKPAERHKDDSRGLVLPGYKYLGPFNGLDKGEPVNEADAAALEHDKAYDRQLDSGDNPYLKYNHADAEFQERLKEDTSFGGNLGRAVFQAKKRVLEPLGLVEEPVKTAPGKKRPVEHSPVEPDSSSGTGKAGQQPARKRLNFGQTGDADSVPDPQPLGQPPAAPSGLGTNTMATGSGAPMADNNEGADGVGNSSGNWHCDSTWMGDRVITTSTRTWALPTYNNHLYKQISSQSGASNDNHYFGYSTPWGYFDFNRFHCHFSPRDWQRLINNNWGFRPKRLKFKLFNIQVKEVTQNDGTTTIANNLTSTVQVFTDSEYQLPYVLGSAHQGCLPPFPADVFMVPQYGYLTLNNGSQAVGRSSFYCLEYFPSQMLRTGNNFTFSYTFEDVPFHSSYAHSQSLDRLMNPLIDQYLYYLSRTDTPSGTTTQSRLQFSQAGASDIRNQSRNWLPGPCYRQQRVSKTSADNNNSEYSWTGATKYHLNGRDSLVNPGPAMASHKDDEEKFFPQSGVLIFGKQGSEKTSVDIEKVMITDEEEIRTTNPVATEQYGSVSTNLQRGNRQAATADVNTQGVLPGMVWQDRDVYLQGPIWAKIPHTDGHFHPSPLMGGFGLKHPPPQILIKNTPVPANPSTTFSAAKFASFITQYSTGQVSVEIEWELQKENSKRWNPEVQYTSNYNKSVNVDFTVDTNGVYSEPRPIGTRYLTRNQ

SEQ ID NO: 5212 - DNA, 2208 bp, Artificial Sequence
  Description of Artificial Sequence: Synthetic polynucleotide
atggctgccgatggttatcttccagattggctcgaggacactctctctgaaggaataagacagtggtggaagctcaaacctggcccaccaccaccaaagcccgcagagcggcataaggacgacagcaggggtcttgtgcttcctgggtacaagtacctcggacccttcaacggactcgacaagggagagccggtcaacgaggcagacgccgcggccctcgagcacgacaaagcctatgaccggcagctcgacagcggagacaacccgtacctcaagtacaaccacgccgacgcggagtttcaggaacgccttaaagaagatacgtcttttgggggcaacctcggacgagcagtcttccaggcgaaaaagagggttcttgaacctctgggcctggttgaggaacctgttaagacggctccgggaaaaaagaggccggtagagcactctcctgtggagccagactcctcctcgggaaccggaaaggcgggccagcagcctgcaagaaaaagattgaattttggtcagactggagacgcagactcagtacctgacccccagcctctcggacagccaccagcagccccctctggtctgggaactaatacgatggctacaggcagtggcgcaccaatggcagacaataacgagggcgccgacggagtgggtaattcctcgggaaattggcattgcgattccacatggatgggcgacagagtcatcaccaccagcacccgaacctgggccctgcccacctacaacaaccacctctacaaacaaatttccagccaatcaggagcctcgaacgacaatcactactttggctacagcaccccttgggggtattttgacttcaacagattccactgccacttttcaccacgtgactggcaaagactcatcaacaacaactggggattccgacccaagagactcaagttcaagctctttaacattcaagtcaaagaggtcacgcagaatgacggtacgacgacgattgccaataaccttaccagcacggttcaggtgtttactgactcggagtaccagctcccgtacgtcctcggctcggcgcatcaaggatgcctcccgccgttcccagcagacgtcttcatggtgccacagtatggatacctcaccctgaacaacgggagtcaggcagtaggacgctcttcattttactgcctggagtactttccttctcagatgctgcgtaccggtaacaactttaccttcagctacacttttgaggacgttcctttccacagcagctacgctcacagccagagtctggaccgtctcatgaatcctctcatcgaccagtacctgtattacttgagcagaacagacactccaagtggaaccaccacgcagtcaaggcttcagttttctcaggccggagcgagtgacattcggaaccagtctaggaactggcttcctggaccctgttaccgccagcagcgagtatcaaagacatctgcggataacaacaacagtgaatactcgtggactggagctaccaagtaccacctcaatggcagagactctctggtgaatccgggcccggccatggcaagccacaaggacgatgaagaaaagttttttcctcagagcggggttctcatctttgggaagcaaggctcagagaaaacaagtgtggacattgaaaaggtcatgattacagacgaagaggaaatcaggacaaccaatcccgtggctacggagcagtatggttctgtatctaccaacctccagagaggcaacagacaagcagctaccgcagatgtcaacacacaaggcgttcttccaggcatggtctggcaggacagagatgtgtaccttcaggggcccatctgggcaaagattccacacacggacggacattttcacccctctcccctcatgggtggattcggacttaaacaccctcctccacagattctcatcaagaacaccccggtacctgcgaatccttcgaccaccttcagtgcggcaaagtttgcttccttcatcacacagtactccacgggacaggtcagcgtggagatcgagtgggagctgcagaaggaaaacagcaaacgctggaatcccgaagttcagtacacttccaactacaacaagtctgttaatgtggactttactgtggacactaatggcgtgtattcagagcctcgccccattggcaccagatacctgactcgtaatcagtaa

SEQ ID NO: 5213 - DNA, 2208 bp, Artificial Sequence
  Description of Artificial Sequence: Synthetic polynucleotide
atggctgccgatggttatcttccagattggctcgaggacactctctctgaaggaataagacagtggtggaagctcaaacctggcccaccaccaccaaagcccgcagagcggcataaggacgacagcaggggtcttgtgcttcctgggtacaagtacctcggacccttcaacggactcgacaagggagagccggtcaacgaggcagacgccgcggccctcgagcacgacaaagcctatgaccggcagctcgacagcggagacaacccgtacctcaagtacaaccacgccgacgcggagtttcaggagcgccttaaagaagatacgtcttttgggggcaacctcggacgagcagtcttccaggcgaaaaagagggttcttgaacctctgggcctggttgaggaacctgttaagacggctccgggaaaaaagaggccggtagagcactctcctgtggagccagactcctcctcgggaaccggaaaggcgggccagcagcctgcaagaaaaagattgaattttggtcagactggagacgcagactcagtacctgatccccagcctctcggacagccaccagcagccccctctggtctgggaactaatacgatggctacaggcagtggcgcaccaatggcagacaataacgagggcgccgacggagtgggtaattcctcgggaaattggcattgcgattccacatggatgggcgacagagtcatcaccaccagcacccgaacctgggccctgcccacctacaacaaccacctctacaaacaaatttccagccaatcaggagcctcgaacgacaatcactactttggctacagcaccccttgggggtattttgacttcaacagattccactgccacttttcaccacgtgactggcaaagactcatcaacaacaactggggattccgacccaagagactcaagttcaagctctttaacattcaagtcaaagaggtcacgcagaatgacggtacgacgacgattgccaataaccttaccagcacggttcaggtgtttactgactcggagtaccagctcccgtatgtcctcggctcggcgcatcaaggatgcctcccgccgttcccagcagacgtcttcatggtgccacagtatggatacctcaccctgaacaacgggagtcaggcagtaggacgctcttcattttactgcctggagtactttccttctcagatgctgcgtaccggtaacaactttaccttcagctacacttttgaggacgttcctttccacagcagctacgctcacagccagagtctggaccgtctcatgaatcctctcatcgaccagtacctgtattacttgagcagaacagacactccaagtggaaccaccacgcagtcaaggcttcagttttctcaggccggagcgagtgacattcgggaccagtctaggaactggcttcctggaccctgttaccgccagcagcgagtatcaaagacatctgcggataacaacaacagtgaatactcgtggactggagctaccaagtaccacctcaatggcagagactctctggtgaatccgggcccggccatggcaagccacaaggacgatgaagaaaagttttttcctcagagcggggttctcatctttgggaagcaaggctcagagaaaacaagtgtggacattgaaaaggtcatgattacagacgaagaggaaatcaggacaaccaatcccgtggctacggagcagtatggttctgtatctaccaacctccagagaggcaacagacaagcagctaccgcagatgtcaacacacaaggcgttcttccaggcatggtctggcaggacagagatgtgtaccttcaggggcccatctgggcaaagattccacacacggacggacattttcacccctctcccctcatgggtggattcggacttaaacaccctcctccacagattctcatcaagaacaccccggtacctgcgaatccttcgaccaccttcagtgcggcaaagtttgcttccttcatcacacagtactccacgggacaggtcagcgtggagatcgagtgggagctgcagaaggaaaacagcaaacgctggaatcccgaagttcagtacacttccaactacaacaagtctgttaatgtggactttactgtggacactaatggcgtgtattcagagcctcgccccattggcaccagatacctgactcgtaatctgtaa

SEQ ID NO: 5214 - protein, 735 aa, Artificial Sequence
  Description of Artificial Sequence: Synthetic polypeptide
MAADGYLPDWLEDTLSEGIRQWWKLKPGPPPPKPAERHKDDSRGLVLPGYKYLGPFNGLDKGEPVNEADAAALEHDKAYDRQLDSGDNPYLKYNHADAEFQERLKEDTSFGGNLGRAVFQAKKRVLEPLGLVEEPVKTAPGKKRPVEHSPVEPDSSSGTGKAGQQPARKRLNFGQTGDADSVPDPQPLGQPPAAPSGLGTNTMATGSGAPMADNNEGADGVGNSSGNWHCDSTWMGDRVITTSTRTWALPTYNNHLYKQISSQSGASNDNHYFGYSTPWGYFDFNRFHCHFSPRDWQRLINNNWGFRPKRLKFKLFNIQVKEVTQNDGTTTIANNLTSTVQVFTDSEYQLPYVLGSAHQGCLPPFPADVFMVPQYGYLTLNNGSQAVGRSSFYCLEYFPSQMLRTGNNFTFSYTFEDVPFHSSYAHSQSLDRLMNPLIDQYLYYLSRTDTPSGTTTQSRLQFSQAGASDIRDQSRNWLPGPCYRQQRVSKTSADNNNSEYSWTGATKYHLNGRDSLVNPGPAMASHKDDEEKFFPQSGVLIFGKQGSEKTSVDIEKVMITDEEEIRTTNPVATEQYGSVSTNLQRGNRQAATADVNTQGVLPGMVWQDRDVYLQGPIWAKIPHTDGHFHPSPLMGGFGLKHPPPQILIKNTPVPANPSTTFSAAKFASFITQYSTGQVSVEIEWELQKENSKRWNPEVQYTSNYNKSVNVDFTVDTNGVYSEPRPIGTRYLTRNL

SEQ ID NO: 5215 - DNA, 2172 bp, Artificial Sequence
  Description of Artificial Sequence: Synthetic polynucleotide
atgtcttttgttgatcaccctccagattggttggaagaagttggtgaaggtcttcgcgagtttttgggccttgaagcgggcccaccgaaaccaaaacccaatcagcagcatcaagatcaagcccgtggtcttgtgctgcctggttataactatctcggacccggaaacggtctcgatcgaggagagcctgtcaacagggcagacgaggtcgcgcgagagcacgacatctcgtacaacgagcagcttgaggcgggagacaacccctacctcaagtacaaccacgcggacgccgagtttcaggagaagctcgccgacgacacatccttcgggggaaacctcggaaaggcagtctttcaggccaagaaaagggttctcgaaccttttggcctggttgaagagggtgctaagacggcccctaccggaaagcggatagacgaccactttccaaaaagaaagaaggctcggaccgaagaggactccaagccttccacctcgtcagacgccgaagctggacccagcggatcccagcagctgcaaatcccagcccaaccagcctcaagtttgggagctgatacaatgtctgcgggaggtggcggcccattgggcgacaataaccaaggtgccgatggagtgggcaatgcctcgggagattggcattgcgattccacgtggatgggggacagagtcgtcaccaagtccacccgaacctgggtgctgcccagctacaacaaccaccagtaccgagagatcaaaagcggctccgtcgacggaagcaacgccaacgcctactttggatacagcaccccctgggggtactttgactttaaccgcttccacagccactggagcccccgagactggcaaagactcatcaacaactactggggcttcagaccccggtccctcagagtcaaaatcttcaacattcaagtcaaagaggtcacggtgcaggactccaccaccaccatcgccaacaacctcacctccaccgtccaagtgtttacggacgacgactaccagctgccctacgtcgtcggcaacgggaccgagggatgcctgccggccttccctccgcaggtctttacgctgccgcagtacggttacgcgacgctgaaccgcgacaacacagaaaatcccaccgagaggagcagcttcttctgcctagagtactttcccagcaagatgctgagaacgggcaacaactttgagtttacctacaactttgaggaggtgcccttccactccagcttcgctcccagtcagaacctgttcaagctggccaacccgctggtggaccagtacttgtaccgcttcgtgagcacaaataacactggcggagtccagttcaacaagaacctggccgggagatacgccaacacctacaaaaactggttcccggggcccatgggccgaacccagggctggaacctgggctccggggtcaaccgcgccagtgtcagcgccttcgccacgaccaataggatggagctcgagggcgcgagttaccaggtgcccccgcagccgaacggcatgaccaacaacctccagggcagcaacacctatgccctggagaacactatgatcttcaacagccagccggcgaacccgggcaccaccgccacgtacctcgagggcaacatgctcatcaccagcgagagcgagacgcagccggtgaaccgcgtggcgtacaacgtcggcgggcagatggccaccaacaaccagagctccaccactgcccccgcgaccggcacgtacaacctccaggaaatcgtgcccggcagcgtgtggatggagagggacgtgtacctccaaggacccatctgggccaagatcccagagacgggggcgcactttcacccctctccggccatgggcggattcggactcaaacacccaccgcccatgatgctcatcaagaacacgcctgtgcccggaaatatcaccagcttctcggacgtgcccgtcagcagcttcatcacccagtacagcaccgggcaggtcaccgtggagatggagtgggagctcaagaaggaaaactccaagaggtggaacccagagatccagtacacaaacaactacaacgacccccagtttgtggactttgccccggacagcaccggggaatacagaaccaccagacctatcggaacccgataccttacccgacccctt

SEQ ID NO: 5216 - DNA, 2214 bp, Artificial Sequence
  Description of Artificial Sequence: Synthetic polynucleotide
atggctgccgatggttatcttccagattggctcgaggacaacctctctgagggcattcgcgagtggtgggcgctgaaacctggagccccgaagcccaaagccaaccagcaaaagcaggacgacggccggggtctggtgcttcctggctacaagtacctcggacccttcaacggactcgacaagggggagcccgtcaacgcggcggacgcagcggccctcgagcacgacaaggcctacgaccagcagctgcaggcgggtgacaatccgtacctgcggtataaccacgccgacgccgagtttcaggagcgtctgcaagaagatacgtcttttgggggcaacctcgggcgagcagtcttccaggccaagaagcgggttctcgaacctctcggtctggttgaggaaggcgctaagacggctcctggaaagaagagaccggtagagccatcaccccagcgttctccagactcctctacgggcatcggcaagaaaggccaacagcccgccagaaaaagactcaattttggtcagactggcgactcagagtcagttccagaccctcaacctctcggagaacctccagcagcgccctctggtgtgggacctaatacaatggctgcaggcggtggcgcaccaatggcagacaataacgaaggcgccgacggagtgggtagttcctcgggaaattggcattgcgattccacatggctgggcgacagagtcatcaccaccagcacccgaacctgggccctgcccacctacaacaaccacctctacaagcaaatctccaacgggacatcgggaggagccaccaacgacaacacctacttcggctacagcaccccctgggggtattttgactttaacagattccactgccacttttcaccacgtgactggcagcgactcatcaacaacaactggggattccggcccaagagactcagcttcaagctcttcaacatccaggtcaaggaggtcacgcagaatgaaggcaccaagaccatcgccaataacctcaccagcaccatccaggtgtttacggactcggagtaccagctgccgtacgttctcggctctgcccaccagggctgcctgcctccgttcccggcggacgtgttcatgattccccagtacggctacctaacactcaacaacggtagtcaggccgtgggacgctcctccttctactgcctggaatactttccttcgcagatgctgagaaccggcaacaacttccagtttacttacaccttcgaggacgtgcctttccacagcagctacgcccacagccagagcttggaccggctgatgaatcctctgattgaccagtacctgtactacttgtctcggactcaaacaacaggaggcacggcaaatacgcagactctgggcttcagccaaggtgggcctaatacaatggccaatcaggcaaagaactggctgccaggaccctgttaccgccaacaacgcgtctcaacgacaaccgggcaaaacaacaatagcaactttgcctggactgctgggaccaaataccatctgaatggaagaaattcattggctaatcctggcatcgctatggcaacacacaaagacgacgaggagcgtttttttcccagtaacgggatcctgatttttggcaaacaaaatgctgccagagacaatgcggattacagcgatgtcatgctcaccagcgaggaagaaatcaaaaccactaaccctgtggctacagaggaatacggtatcgtggcagataacttgcctgagcggacggcgatgagtcttccgggaactgtcaacagccagggggccttacccggtatggtctggcagaaccgggacgtgtacctgcagggtcccatctgggccaagattcctcacacggacggcaacttccacccgtctccgctgatgggcggctttggcctgaaacatcctccgcctcagatcctgatcaagaacacgcctgtacctgcggatcctccgaccaccttcaaccagtcaaagctgaactctttcatcacgcaatacagcaccggacaggtcagcgtggaaattgaatgggagctgcagaaggaaaacagcaagcgctggaaccccgagatccagtacacctccaactactacaaatctacaagtgtggactttgctgttaatacagaaggcgtgtactctgaaccccgccccattggcacccgttacctcacccgtaatctg

SEQ ID NO: 5217 - protein, 738 aa, Artificial Sequence
  Description of Artificial Sequence: Synthetic polypeptide
MAADGYLPDWLEDNLSEGIREWWALKPGAPKPKANQQKQDDGRGLVLPGYKYLGPFNGLDKGEPVNAADAAALEHDKAYDQQLQAGDNPYLRYNHADAEFQERLQEDTSFGGNLGRAVFQAKKRVLEPLGLVEEGAKTAPGKKRPVEPSPQRSPDSSTGIGKKGQQPARKRLNFGQTGDSESVPDPQPLGEPPAAPSGVGPNTMAAGGGAPMADNNEGADGVGSSSGNWHCDSTWLGDRVITTSTRTWALPTYNNHLYKQISNGTSGGATNDNTYFGYSTPWGYFDFNRFHCHFSPRDWQRLINNNWGFRPKRLSFKLFNIQVKEVTQNEGTKTIANNLTSTIQVFTDSEYQLPYVLGSAHQGCLPPFPADVFMIPQYGYLTLNNGSQAVGRSSFYCLEYFPSQMLRTGNNFQFTYTFEDVPFHSSYAHSQSLDRLMNPLIDQYLYYLSRTQTTGGTANTQTLGFSQGGPNTMANQAKNWLPGPCYRQQRVSTTTGQNNNSNFAWTAGTKYHLNGRNSLANPGIAMATHKDDEERFFPSNGILIFGKQNAARDNADYSDVMLTSEEEIKTTNPVATEEYGIVADNLPERTAMSLPGTVNSQGALPGMVWQNRDVYLQGPIWAKIPHTDGNFHPSPLMGGFGLKHPPPQILIKNTPVPADPPTTFNQSKLNSFITQYSTGQVSVEIEWELQKENSKRWNPEIQYTSNYYKSTSVDFAVNTEGVYSEPRPIGTRYLTRNL

SEQ ID NO: 5218 - DNA, 2214 bp, Artificial Sequence
  Description of Artificial Sequence: Synthetic polynucleotide
atggctgccgatggttatcttccagattggctcgaggacaacctctctgagggcattcgcgagtggtgggcgctgaaacctggagccccgaagcccaaagccaaccagcaaaagcaggacgacggccggggtctggtgcttcctggctacaagtacctcggacccttcaacggactcgacaagggggagcccgtcaacgcggcggacgcagcggccctcgagcacgacaaggcctacgaccagcagctgcaggcgggtgacaatccgtacctgcggtataaccacgccgacgccgagtttcaggagcgtctgcaagaagatacgtcttttgggggcaacctcgggcgagcagtcttccaggccaagaagcgggttctcgaacctctcggtctggttgaggaaggcgctaagacggctcctggaaagaagagaccggtagagccatcaccccagcgttctccagactcctctacgggcatcggcaagaaaggccaacagcccgccagaaaaagactcaattttggtcagactggcgactcagagtcagttccagaccctcaacctctcggagaacctccagcagcgccctctggtgtgggacctaatacaatggctgcaggcggtggcgcaccaatggcagacaataacgaaggcgccgacggagtgggtagttcctcgggaaattggcattgcgattccacatggctgggcgacagagtcatcaccaccagcacccgaacctgggccctgcccacctacaacaaccacctctacaagcaaatctccaacgggacatcgggaggagccaccaacgacaacacctacttcggctacagcaccccctgggggtattttgactttaacagattccactgccacttttcaccacgtgactggcagcgactcatcaacaacaactggggattccggcccaagagactcagcttcaagctcttcaacatccaggtcaaggaggtcacgcagaatgaaggcaccaagaccatcgccaataacctcaccagcaccatccaggtgtttacggactcggagtaccagctgccgtacgttctcggctctgcccaccagggctgcctgcctccgttcccggcggacgtgttcatgattccccagtacggctacctaacactcaacaacggtagtcaggccgtgggacgctcctccttctactgcctggaatactttccttcgcagatgctgagaaccggcaacaacttccagtttacttacaccttcgaggacgtgcctttccacagcagctacgcccacagccagagcttggaccggctgatgaatcctctgattgaccagtacctgtactacttgtctcggactcaaacaacaggaggcacggcaaatacgcagactctgggcttcagccaaggtgggcctaatacaatggccaatcaggcaaagaactggctgccaggaccctgttaccgccaacaacgcgtctcaacgacaaccgggcaaaacaacaatagcaactttgcctggactgctgggaccaaataccatctgaatggaagaaattcattggctaatcctggcatcgctatggcaacacacaaagacgacgaggagcgtttttttcccagtaacgggatcctgatttttggcaaacaaaatgctgccagagacaatgcggattacagcgatgtcatgctcaccagcgaggaagaaatcaaaaccactaaccctgtggctacagaggaatacggtatcgtggcagataacttgagttttagtcgtgcggttctttgtgatggaactgtcaacagccagggggccttacccggtatggtctggcagaaccgggacgtgtacctgcagggtcccatctgggccaagattcctcacacggacggcaacttccacccgtctccgctgatgggcggctttggcctgaaacatcctccgcctcagatcctgatcaagaacacgcctgtacctgcggatcctccgaccaccttcaaccagtcaaagctgaactctttcatcacgcaatacagcaccggacaggtcagcgtggaaattgaatgggagctgcagaaggaaaacagcaagcgctggaaccccgagatccagtacacctccaactactacaaatctacaagtgtggactttgctgttaatacagaaggcgtgtactctgaaccccgccccattggcacccgttacctcacccgtaatctg

SEQ ID NO: 5219 - protein, 738 aa, Artificial Sequence
  Description of Artificial Sequence: Synthetic polypeptide
MAADGYLPDWLEDNLSEGIREWWALKPGAPKPKANQQKQDDGRGLVLPGYKYLGPFNGLDKGEPVNAADAAALEHDKAYDQQLQAGDNPYLRYNHADAEFQERLQEDTSFGGNLGRAVFQAKKRVLEPLGLVEEGAKTAPGKKRPVEPSPQRSPDSSTGIGKKGQQPARKRLNFGQTGDSESVPDPQPLGEPPAAPSGVGPNTMAAGGGAPMADNNEGADGVGSSSGNWHCDSTWLGDRVITTSTRTWALPTYNNHLYKQISNGTSGGATNDNTYFGYSTPWGYFDFNRFHCHFSPRDWQRLINNNWGFRPKRLSFKLFNIQVKEVTQNEGTKTIANNLTSTIQVFTDSEYQLPYVLGSAHQGCLPPFPADVFMIPQYGYLTLNNGSQAVGRSSFYCLEYFPSQMLRTGNNFQFTYTFEDVPFHSSYAHSQSLDRLMNPLIDQYLYYLSRTQTTGGTANTQTLGFSQGGPNTMANQAKNWLPGPCYRQQRVSTTTGQNNNSNFAWTAGTKYHLNGRNSLANPGIAMATHKDDEERFFPSNGILIFGKQNAARDNADYSDVMLTSEEEIKTTNPVATEEYGIVADNLSFSRAVLCDGTVNSQGALPGMVWQNRDVYLQGPIWAKIPHTDGNFHPSPLMGGFGLKHPPPQILIKNTPVPADPPTTFNQSKLNSFITQYSTGQVSVEIEWELQKENSKRWNPEIQYTSNYYKSTSVDFAVNTEGVYSEPRPIGTRYLTRNL

SEQ ID NO: 5220 - DNA, 2215 bp, Artificial Sequence
  Description of Artificial Sequence: Synthetic polynucleotide
atggctgccgatggttatcttccagattggctcgaggacactctctctgaaggaataagacagtggtggaagctcaaacctggcccaccaccaccaaagcccgcagagcggcataaggacgacagcaggggtcttgtgcttcctgggtacaagtacctcggacccttcaacggactcgacaagggagagccggtcaacgaggcagacgccgcggccctcgagcacgacaaagcctacgaccggcagctcgacagcggagacaacccgtacctcaagtacaaccacgccgacgccgagttccaggagcggctcaaagaagatacgtcttttgggggcaacctcgggcgagcagtcttccaggccaaaaagaggcttcttgaacctcttggtctggttgaggaagcggctaagacggctcctggaaagaagaggcctgtagagcactctcctgtggagccagactcctcctcgggaaccggaaaggcgggccagcagcctgcaagaaaaagattgaattttggtcagactggagacgcagactcagtcccagaccctcaaccaatcggagaacctcccgcagccccctcaggtgtgggatctcttacaatggctgcaggcggtggcgcaccaatggcagacaataacgagggcgccgacggagtgggtaattcctcgggaaattggcattgcgattccacatggatgggcgacagagtcatcaccaccagcacccgaacctgggccctgcccacctacaacaaccacctctacaagcaaatctccaacagcacatctggaggatcttcaaatgacaacgcctacttcggctacagcaccccctgggggtattttgactttaacagattccactgccacttttcaccacgtgactggcagcgactcatcaacaacaactggggattccggcccaagagactcagcttcaagctcttcaacatccaggtcaaggaggtcacgcagaatgaaggcaccaagaccatcgccaataacctcaccagcaccatccaggtgtttacggactcggagtaccagctgccgtacgttctcggctctgcccaccagggctgcctgcctccgttcccggcggacgtgttcatgattccccagtacggctacctaacactcaacaacggtagtcaggccgtgggacgctcctccttctactgcctggaatactttccttcgcagatgctgagaaccggcaacaacttccagtttacttacaccttcgaggacgtgcctttccacagcagctacgcccacagccagagcttggaccggctgatgaatcctctgattgaccagtacctgtactacttgtctcggactcaaacaacaggaggcacgacaaatacgcagactctgggcttcagccaaggtgggcctaatacaatggccaatcaggcaaagaactggctgccaggaccctgttaccgccagcagcgagtatcaaagacatctgcggataacaacaacagtgaatactcgtggactggagctaccaagtaccacctcaatggcagagactctctggtgaatccgggcccggccatggcaagccacaaggacgatgaagaaaagtttttttcctcagagcggggttctcatctttgggaagcaaggctcagagaaaacaaatgtggacattgaaaaggtcatgattacagacgaagaggaaatcaggacaaccaatcccgtggctacggagcagtatggttctgtatctaccaacctccagagaggcaacagacaagcagctaccgcagatgtcaacacacaaggcgttcttccaggcatggtctggcaggacagagatgtgtaccttcaggggcccatctgggcaaagattccacacacggacggacattttcacccctctcccctcatgggtggattcggacttaaacaccctccgcctcagatcctgatcaagaacacgcctgtacctgcggatcctccgaccaccttcaaccagtcaaagctgaactctttcatcacccagtattctactggccaagtcagcgtggagatcgagtgggagctgcagaaggaaaacagcaagcgctggaaccccgagatccagtacacctccaactactacaaatctacaagtgtggactttgctgttaatacagaaggcgtgtactctgaaccccgccccattggcacccgttacctcacccgtaatctgtaa

SEQ ID NO: 5221 - protein, 737 aa, Artificial Sequence
  Description of Artificial Sequence: Synthetic polypeptide
MAADGYLPDWLEDTLSEGIRQWWKLKPGPPPPKPAERHKDDSRGLVLPGYKYLGPFNGLDKGEPVNEADAAALEHDKAYDRQLDSGDNPYLKYNHADAEFQERLKEDTSFGGNLGRAVFQAKKRLLEPLGLVEEAAKTAPGKKRPVEHSPVEPDSSSGTGKAGQQPARKRLNFGQTGDADSVPDPQPIGEPPAAPSGVGSLTMAAGGGAPMADNNEGADGVGNSSGNWHCDSTWMGDRVITTSTRTWALPTYNNHLYKQISNSTSGGSSNDNAYFGYSTPWGYFDFNRFHCHFSPRDWQRLINNNWGFRPKRLSFKLFNIQVKEVTQNEGTKTIANNLTSTIQVFTDSEYQLPYVLGSAHQGCLPPFPADVFMIPQYGYLTLNNGSQAVGRSSFYCLEYFPSQMLKTGNNFQFTYTFEDVPFHSSYAHSQSLDRLMNPLIDQYLYYLSRTQTTGGTTNTQTLGFSQGGPNTMANQAKNWLPGPCYRQQRVSKTSADNNNSEYSWTGATKYHLNGRDSLVNPGPAMASHKDDEEKFFPQSGVLIFGKQGSEKTNVDIEKVMITDEEEIRTTNPVATEQYGSVSTNLQRGNRQAATADVNTQGVLPGMVWQDRDVYLQGPIWAKIPHTDGHFHPSPLMGGFGLKHPPPQILIKNTPVPADPPTTFNQSKLNSFITQYSTGQVSVEIEWELQKENSKRWNPEIQYTSNYYKSTSVDFAVNTEGVYSEPRPIGTRYLTRNL

SEQ ID NO: 5222 - protein, 737 aa, Artificial Sequence
  Description of Artificial Sequence: Synthetic polypeptide
MAADGYLPDWLEDTLSEGIRQWWKLKPGPPPPKPAERHKDDSRGLVLPGYKYLGPFNGLDKGEPVNEADAAALEHDKAYDRQLDSGDNPYLKYNHADAEFQERLKEDTSFGGNLGRAVFQAKKRLLEPLGLVEEAAKTAPGKKRPVEHSPVEPDSSSGTGKAGQQPARKRLNFGQTGDADSVPDPQPIGEPPAAPSGVGSLTMAAGGGAPMADNNEGADGVGNSSGNWHCDSTWMGDRVITTSTRTWALPTYNNHLYKQISNSTSGGSSNDNAYFGYSTPWGYFDFNRFHCHFSPRDWQRLINNNWGFRPKRLSFKLFNIQVKEVTQNEGTKTIANNLTSTIQVFTDSEYQLPYVLGSAHQGCLPPFPADVFMIPQYGYLTLNNGSQAVGRSSFYCLEYFPSQMLKTGNNFQFTYTFEDVPFHSSYAHSQSLDRLMNPLIDQYLYYLSRTQTTGGTTNTQTLGFSQGGPNTMANQAKNWLPGPCYRQQRVSKTSADNNNSEYSWTGATKYHLNGRDSLVNPGPAMASHKDDEEKFFPQSGVLIFGKQGSEKTNVDIEKVMITDEEEIRTTNPVATEQYGSVSTNLQQGNTQAATADVNTQGVLPGMVWQDRDVYLQGPIWAKIPHTDGHFHPSPLMGGFGLKHPPPQILIKNTPVPADPPTTFNQSKLNSFITQYSTGQVSVEIEWELQKENSKRWNPEIQYTSNYYKSTSVDFAVNTEGVYSEPRPIGTRYLTRNL

SEQ ID NO: 5223 - protein, 737 aa, Artificial Sequence
  Description of Artificial Sequence: Synthetic polypeptide
MAADGYLPDWLEDTLSEGIRQWWKLKPGPPPPKPAERHKDDSRGLVLPGYKYLGPFNGLDKGEPVNEADAAALEHDKAYDRQLDSGDNPYLKYNHADAEFQERLKEDTSFGGNLGRAVFQAKKRLLEPLGLVEEAAKTAPGKKRPVEHSPVEPDSSSGTGKAGQQPARKRLNFGQTGDADSVPDPQPIGEPPAAPSGVGSLTMAAGGGAPMADNNEGADGVGNSSGNWHCDSTWMGDRVITTSTRTWALPTYNNHLYKQISNSTSGGSSNDNAYFGYSTPWGYFDFNRFHCHFSPRDWQRLINNNWGFRPKRLSFKLFNIQVKEVTQNEGTKTIANNLTSTIQVFTDSEYQLPYVLGSAHQGCLPPFPADVFMIPQYGYLTLNNGSQAVGRSSFYCLEYFPSQMLRTGNNFQFTYTFEDVPFHSSYAHSQSLDRLMNPLIDQYLYYLSRTQTTGGTTNTQTLGFSQGGPNTMANQAKNWLPGPCYRQQRVSKTSADNNNSEYSWTGATKYHLNGRDSLVNPGPAMASHKDDEEKFFPQSGVLIFGKQGSEKTNVDIEKVMITDEEEIRTTNPVATEQYGSVSTNLQQGNTQAATADVNTQGVLPGMVWQDRDVYLQGPIWAKIPHTDGHFHPSPLMGGFGLKHPPPQILIKNTPVPADPPTTFNQSKLNSFITQYSTGQVSVEIEWELQKENSKRWNPEIQYTSNYYKSTSVDFAVNTEGVYSEPRPIGTRYLTRNL

SEQ ID NO: 5224 - DNA, 2214 bp, Artificial Sequence
  Description of Artificial Sequence: Synthetic polynucleotide
atggctgccgatggttatcttccagattggctcgaggacaaccttagtgaaggaattcgcgagtggtgggctttgaaacctggagcccctcaacccaaggcaaatcaacaacatcaagacaacgctcgaggtcttgtgcttccgggttacaaataccttggacccggcaacggactcgacaagggggagccggtcaacgcagcagacgcggcggccctcgagcacgacaaggcctacgaccagcagctgcaggcgggtgacaatccgtacctgcggtataaccacgccgacgccgagtttcaggagcgtctgcaagaagatacgtcttttgggggcaaccttggcagagcagtcttccaggccaaaaagaggatccttgagcctcttggtctggttgaggaagcagctaaaacggctcctggaaagaagaggcctgtagatcagtctcctcaggaaccggactcatcatctggtgttggcaaatcgggcaaacagcctgccagaaaaagactaaatttcggtcagactggcgactcagagtcagtcccagaccctcaacctctcggagaaccaccagcagcccccacaagtttgggatctaatacaatggcttcaggcggtggcgcaccaatggcagacaataacgagggtgccgatggggtgggtagttcctcgggaaattggcattgcgattcccaatggctgggggacagagtcatcaccaccagcacccgaacctgggccctgcccacctacaacaatcacctctacaagcaaatctccaacgggacatcgggaggagccaccaacgacaacacctacttcggctacagcaccccctgggggtattttgactttaacagattccactgccacttttcaccacgtgactggcagcgactcatcaacaacaactggggattccggcccaagagactcagcttcaagctcttcaacatccaggtcaaggaggtcacgcagaatgaaggcaccaagaccatcgccaataacctcaccagcaccatccaggtgtttacggactcggagtaccagctgccgtacgttctcggctctgcgcaccagggctgcctccctccgttcccggcggacgtgttcatgattccgcaatacggctacctgacgctcaacaatggcagccaagccgtgggacgttcatccttttactgcctggaatatttcccttctcagatgctgagaacgggcaacaactttaccttcagctacacctttgaggaagtgcctttccacagcagctacgcgcacagccagagcttggaccggctgatgaatcctctgattgaccagtacctgtactacttgtctcggactcaaacaacaggaggcacggcaaatacgcagactctgggcttcagccaaggtgggcctaatacaatggccaatcaggcaaagaactggctgccaggaccctgttaccgccaacaacgcgtctcaacgacaaccgggcaaaacaacaatagcaactttgcctggactgctgggaccaaataccatctgaatggaagaaattcattggctaatcctggcatcgctatggcaacacacaaagacgacgaggagcgtttttttcccagtaacgggatcctgatttttggcaaacaaaatgctgccagagacaatgcggattacagcgatgtcatgctcaccagcgaggaagaaatcaaaaccactaaccctgtggctacagaggaatacggtatcgtggcagataacttgcagcagcaaaacacggctcctcaaattggaactgtcaacagccagggggccttacccggtatggtctggcagaaccgggacgtgtacctgcagggtcccatctgggccaagattcctcacacggacggcaacttccacccgtctccgctgatgggcggctttggcctgaaacatcctccgcctcagatcctgatcaagaacacgcctgtacctgcggatcctccgaccaccttcaaccagtcaaagctgaactctttcatcacgcaatacagcaccggacaggtcagcgtggagatcgagtgggagctgcagaaggaaaacagcaagcgctggaacccggagatccagtacacttccaactattacaagtctaataatgttgaatttgctgttaatactgaaggtgtatatagtgaaccccgccccattggcaccagatacctgactcgtaatctgtaa

SEQ ID NO: 5225 - protein, 737 aa, Artificial Sequence
  Description of Artificial Sequence: Synthetic polypeptide
MAADGYLPDWLEDNLSEGIREWWALKPGAPQPKANQQHQDNARGLVLPGYKYLGPGNGLDKGEPVNAADAAALEHDKAYDQQLQAGDNPYLRYNHADAEFQERLQEDTSFGGNLGRAVFQAKKRILEPLGLVEEAAKTAPGKKRPVDQSPQEPDSSSGVGKSGKQPARKRLNFGQTGDSESVPDPQPLGEPPAAPTSLGSNTMASGGGAPMADNNEGADGVGSSSGNWHCDSQWLGDRVITTSTRTWALPTYNNHLYKQISNGTSGGATNDNTYFGYSTPWGYFDFNRFHCHFSPRDWQRLINNNWGFRPKRLSFKLFNIQVKEVTQNEGTKTIANNLTSTIQVFTDSEYQLPYVLGSAHQGCLPPFPADVFMIPQYGYLTLNNGSQAVGRSSFYCLEYFPSQMLRTGNNFTFSYTFEEVPFHSSYAHSQSLDRLMNPLIDQYLYYLSRTQTTGGTANTQTLGFSQGGPNTMANQAKNWLPGPCYRQQRVSTTTGQNNNSNFAWTAGTKYHLNGRNSLANPGIAMATHKDDEERFFPSNGILIFGKQNAARDNADYSDVMLTSEEEIKTTNPVATEEYGIVADNLQQQNTAPQIGTVNSQGALPGMVWQNRDVYLQGPIWAKIPHTDGNFHPSPLMGGFGLKHPPPQILIKNTPVPADPPTTFNQSKLNSFITQYSTGQVSVEIEWELQKENSKRWNPEIQYTSNYYKSNNVEFAVNTEGVYSEPRPIGTRYLTRNL

SEQ ID NO: 5226 - DNA, 2211 bp, Artificial Sequence
  Description of Artificial Sequence: Synthetic polynucleotide
atggctgccgatggttatcttccagattggctcgaggacaacctctctgagggcattcgcgagtggtgggacttgaaacctggagccccgaagcccaaagccaaccagcaaaagcaggacgacggccggggtctggtgcttcctggctacaagtacctcggacccttcaacggactcgacaagggggagcccgtcaacgcggcggacgcagcggccctcgagcacgacaaggcctacgaccagcagctcaaagcgggtgacaatccgtacctgcggtataaccacgccgacgccgagtttcaggagcgtctgcaagaagatacgtcttttgggggcaacctcgggcgagcagtcttccaggccaagaagcgggttctcgaacctctcggtctggttgaggaaggcgctaagacggctcctggaaagaaacgtccggtagagcagtcgccacaagagccagactcctcctcgggcatcggcaagacaggccagcagcccgctaaaaagagactcaattttggtcagactggcgactcagagtcagtccccgacccacaacctctcggagaacctccagcaacccccgctgctgtgggacctactacaatggcttcaggcggtggcgcaccaatggcagacaataacgaaggcgccgacggagtgggtaatgcctcaggaaattggcattgcgattccacatggctgggcgacagagtcatcaccaccagcacccgaacatgggccttgcccacctataacaaccacctctacaagcaaatctccagtgcttcaacgggggccagcaacgacaaccactacttcggctacagcaccccctgggggtattttgatttcaacagattccactgccatttctcaccacgtgactggcagcgactcatcaacaacaattggggattccggcccaagagactcaacttcaagctcttcaacatccaagtcaaggaggtcacgacgaatgatggcgtcacgaccatcgctaataaccttaccagcacggttcaagtcttctcggactcggagtaccagctgccgtacgttctcggctctgcccaccagggctgcctgcctccgttcccggcggacgtgttcatgattccccagtacggctacctaacactcaacaacggtagtcaggccgtgggacgctcctccttctactgcctggaatactttccttcgcagatgctgagaaccggcaacaacttccagtttacttacaccttcgaggacgtgcctttccacagcagctacgcccacagccagagcttggaccggctgatgaatcctctgattgaccagtacctgtactacttgtctcggactcaaacaacaggaggcacggcaaatacgcagactctgggcttcagccaaggtgggcctaatacaatggccaatcaggcaaagaactggctgccaggaccctgttaccgccaacaacgcgtctcaacgacaaccgggcaaaacaacaatagcaattttacctggactggtgcttcaaaatataacctcaatgggcgtgaatccatcatcaaccctggcactgctatggcctcacacaaagacgacgaagacaagttctttcccatgagcggtgtcatgatttttggaaaagagagcgccggagcttcaaacactgcattggacaatgtcatgattacagacgaagaggaaattaaagccactaaccctgtggccaccgaaagatttgggaccgtggcagtcaatttccagagcagcagcacagaccctgcgaccggagatgtgcatgctatgggagcattacctggcatggtgtggcaagatagagacgtgtacctgcagggtcccatttgggccaaaattcctcacacagatggacactttcacccgtctcctcttatgggcggctttggactcaagaacccgcctcctcagatcctcatcaaaaacacgcctgttcctgcgaatcctccggcggagttttcagctacaaagtttgcttcattcatcacccaatactccacaggacaagtgagtgtggaaattgaatgggagctgcagaaagaaaacagcaagcgctggaatcccgaagtgcagtacacatccaattatgcaaaatctgccaacgttgattttactgtggacaacaatggactttatactgagcctcgccccattggcacccgttacctcacccgtcccctgtaa

SEQ ID NO: 5227 - protein, 736 aa, Artificial Sequence
  Description of Artificial Sequence: Synthetic polypeptide
MAADGYLPDWLEDNLSEGIREWWDLKPGAPKPKANQQKQDDGRGLVLPGYKYLGPFNGLDKGEPVNAADAAALEHDKAYDQQLKAGDNPYLRYNHADAEFQERLQEDTSFGGNLGRAVFQAKKRVLEPLGLVEEGAKTAPGKKRPVEQSPQEPDSSSGIGKTGQQPAKKRLNFGQTGDSESVPDPQPLGEPPATPAAVGPTTMASGGGAPMADNNEGADGVGNASGNWHCDSTWLGDRVITTSTRTWALPTYNNHLYKQISSASTGASNDNHYFGYSTPWGYFDFNRFHCHFSPRDWQRLINNNWGFRPKRLNFKLFNIQVKEVTTNDGVTTIANNLTSTVQVFSDSEYQLPYVLGSAHQGCLPPFPADVFMIPQYGYLTLNNGSQAVGRSSFYCLEYFPSQMLRTGNNFQFTYTFEDVPFHSSYAHSQSLDRLMNPLIDQYLYYLSRTQTTGGTANTQTLGFSQGGPNTMANQAKNWLPGPCYRQQRVSTTTGQNNNSNFTWTGASKYNLNGRESIINPGTAMASHKDDEDKFFPMSGVMIFGKESAGASNTALDNVMITDEEEIKATNPVATERFGTVAVNFQSSSTDPATGDVHAMGALPGMVWQDRDVYLQGPIWAKIPHTDGHFHPSPLMGGFGLKNPPPQILIKNTPVPANPPAEFSATKFASFITQYSTGQVSVEIEWELQKENSKRWNPEVQYTSNYAKSANVDFTVDNNGLYTEPRPIGTRYLTRPL

SEQ ID NO: 5228 - DNA, 2211 bp, Artificial Sequence
  Description of Artificial Sequence: Synthetic polynucleotide
atggctgctgacggttatcttccagattggctcgaggacaacctttctgaaggcattcgagagtggtgggcgctgcaacctggagcccctaaacccaaggcaaatcaacaacatcaggacaacgctcggggtcttgtgcttccgggttacaaatacctcggacccggcaacggactcgacaagggggaacccgtcaacgcagcggacgcggcagccctcgagcacgacaaggcctacgaccagcagctcaaggccggtgacaacccctacctcaagtacaaccacgccgacgccgagttccaggagcggctcaaagaagatacgtcttttgggggcaacctcgggcgagcagtcttccaggccaaaaagaggcttcttgaacctcttggtctggttgaggaagcggctaagacggctcctggaaagaagaggcctgtagatcagtctcctcaggaaccggactcatcatctggtgttggcaaatcgggcaaacagcctgccagaaaaagactaaatttcggtcagactggcgactcagagtcagtcccagaccctcaacctctcggagaaccaccagcagcccccacaagtttgggatctaatacaatggcttcaggcggtggcgcaccaatggcagacaataacgagggtgccgatggagtgggtaattcctcaggaaattggcattgcgattcccaatggctgggcgacagagtcatcaccaccagcaccagaacctgggccctgcccacttacaacaaccatctctacaagcaaatctccagccaatcaggagcttcaaacgacaaccactactttggctacagcaccccttgggggtattttgactttaacagattccactgccacttctcaccacgtgactggcagcgactcattaacaacaactggggattccggcccaagaaactcagcttcaagctcttcaacatccaagttaaagaggtcacgcagaacgatggcacgacgactattgccaataaccttaccagcacggttcaagtgtttacggactcggagtatcagctcccgtacgtgctcgggtcggcgcaccaaggctgtctcccgccgtttccagcggacgtcttcatggtccctcagtatggatacctcaccctgaacaacggaagtcaagcggtgggacgctcatccttttactgcctggagtacttcccttcgcagatgctaaggactggaaataacttccaattcagctataccttcgaggatgtaccttttcacagcagctacgctcacagccagagtttggatcgcttgatgaatcctcttattgatcagtatctgtactacctgaacagaacgcaaggaacaacctctggaacaaccaaccaatcacggctgctttttagccaggctgggcctcagtctatgtctttgcaggccagaaattggctacctgggccctgctaccggcaacagagactttcaaagactgctaacgacaacaacaacagtaactttccttggacagcggccagcaaatatcatctcaatggccgcgactcgctggtgaatccaggaccagctatggccagtcacaaggacgatgaagaaaaatttttccctatgcacggcaatctaatatttggcaaagaagggacaacggcaagtaacgcagaattagataatgtaatgattacggatgaagaagagattcgtaccaccaatcctgtggcaacagagcagtatggaactgtggcaaataacttgcagagctcaaatacagctcccacgactagaactgtcaatgatcagggggccttacctggcatggtgtggcaagatcgtgacgtgtaccttcaaggacctatctgggcaaagattcctcacacggatggacactttcatccttctcctctgatgggaggctttggactgaaacatccgcctcctcaaatcatgatcaaaaatactccggtaccggcaaatcctccgacgactttcagcccggccaagtttgcttcatttatcactcagtactccactggacaggtcagcgtggaaattgagtgggagctacagaaagaaaacagcaaacgttggaatccagagattcagtacacttccaactacaacaagtctgttaatgtggactttactgtagacactaatggtgtttatagtgaacctcgccccattggcacccgttaccttacccgtcccctgtaa

SEQ ID NO: 5229 - protein, 736 aa, Artificial Sequence
  Description of Artificial Sequence: Synthetic polypeptide
MAADGYLPDWLEDNLSEGIREWWALQPGAPKPKANQQHQDNARGLVLPGYKYLGPGNGLDKGEPVNAADAAALEHDKAYDQQLKAGDNPYLKYNHADAEFQERLKEDTSFGGNLGRAVFQAKKRLLEPLGLVEEAAKTAPGKKRPVDQSPQEPDSSSGVGKSGKQPARKRLNFGQTGDSESVPDPQPLGEPPAAPTSLGSNTMASGGGAPMADNNEGADGVGNSSGNWHCDSQWLGDRVITTSTRTWALPTYNNHLYKQISSQSGASNDNHYFGYSTPWGYFDFNRFHCHFSPRDWQRLINNNWGFRPKKLSFKLFNIQVKEVTQNDGTTTIANNLTSTVQVFTDSEYQLPYVLGSAHQGCLPPFPADVFMVPQYGYLTLNNGSQAVGRSSFYCLEYFPSQMLRTGNNFQFSYTFEDVPFHSSYAHSQSLDRLMNPLIDQYLYYLNRTQGTTSGTTNQSRLLFSQAGPQSMSLQARNWLPGPCYRQQRLSKTANDNNNSNFPWTAASKYHLNGRDSLVNPGPAMASHKDDEEKFFPMHGNLIFGKEGTTASNAELDNVMITDEEEIRTTNPVATEQYGTVANNLQSSNTAPTTRTVNDQGALPGMVWQDRDVYLQGPIWAKIPHTDGHFHPSPLMGGFGLKHPPPQIMIKNTPVPANPPTTFSPAKFASFITQYSTGQVSVEIEWELQKENSKRWNPEIQYTSNYNKSVNVDFTVDTNGVYSEPRPIGTRYLTRPL

SEQ ID NO: 5230 - DNA, 2211 bp, Artificial Sequence
  Description of Artificial Sequence: Synthetic polynucleotide
atggctgccgatggttatcttccagattggctcgaggacaaccttagtgaaggaattcgcgagtggtgggctttgaaacctggagcccctcaacccaaggcaaatcaacaacatcaagacaacgctcgaggtcttgtgcttccgggttacaaataccttggacccggcaacggactcgacaagggggagccggtcaacgcagcagacgcggcggccctcgagcacgacaaggcctacgaccagcagctcaaggccggagacaacccgtacctcaagtacaaccacgccgacgccgagttccaggagcggctcaaagaagatacgtcttttgggggcaacctcgggcgagcagtcttccaggccaaaaagaggcttcttgaacctcttggtctggttgaggaagcggctaagacggctcctggaaagaagagaccggtagagccatcaccccagcgttctccagactcctctacgggcatcggcaagaaaggccaacagcccgctaaaaagagactcaattttggtcagactggcgactcagagtcagtccccgacccacaacctctcggagaacctccagcaacccccgctgctgtgggacctactacaatggcttcaggcggtggcgcaccaatggcagacaataacgagggtgccgatggagtgggtaattcctcaggaaattggcattgcgattcccaatggctgggcgacagagtcatcaccaccagcaccagaacctgggccctgcccacttacaacaaccatctctacaagcaaatctccagccaatcaggagcttcaaacgacaaccactactttggctacagcaccccttgggggtattttgactttaacagattccactgccacttttcaccacgtgactggcaaagactcatcaacaacaactggggattccgacccaagagactcaacttcaagctcttcaacatccaagtcaaggaggtcacgacgaatgatggcgtcacgaccatcgctaataaccttaccagcacggttcaagtcttctcggactcggagtaccagttgccgtacgtcctcggctctgcgcaccagggctgcctccctccgttcccggcggacgtgttcatgattccgcagtacggctacctaacgctcaacaatggcagccaagccgtgggacgttcatccttttactgcctggaatatttcccttctcagatgctgagaacgggcaacaactttaccttcagctacacttttgaggacgttcctttccacagcagctacgctcacagccagagtctggaccgtctcatgaatcctctcatcgaccagtacctgtattacttgagcagaacaaacactccaagtggaaccaccacgcagtcaaggcttcagttttctcaggccggagcgagtgacattcgggaccagtctaggaactggcttcctggaccctgttaccgccagcagcgcgtttctaaaacaaaaacagacaacaacaacagcaattttacctggactggtgcttcaaaatataaccttaatgggcgtgaatctataatcaaccctggcactgctatggcctcacacaaagacgacgaagacaagttctttcccatgagcggtgtcatgatttttggaaaagagagcgccggagcttcaaacactgcattggacaatgtcatgattacagacgaagaggaaattaaagccactaaccctgtggccaccgaaagatttgggaccgtggcagtcaatttccagagcagcagcacagaccctgcgaccggagatgtgcatgttatgggagccttacctggaatggtgtggcaagacagagacgtatacctgcagggtcctatttgggccaaaattcctcacacggatggacactttcacccgtctcctcttatgggcggctttggactcaagaacccgcctcctcagatcctcatcaaaaacacgcctgttcctgcgaatcctccggcggagttttcagctacaaagtttgcttcattcatcacccaatactccacaggacaagtgagtgtggaaattgaatgggagctgcagaaagaaaacagcaagcgctggaatcccgaagtgcagtacacatccaattatgcaaaatctgccaacgttgattttactgtggacaacaatggactttatactgagcctcgccccattggcacccgttaccttacccgtcccctgtaa

SEQ ID NO: 5231 - protein, 736 aa, Artificial Sequence
  Description of Artificial Sequence: Synthetic polypeptide
MAADGYLPDWLEDNLSEGIREWWALKPGAPQPKANQQHQDNARGLVLPGYKYLGPGNGLDKGEPVNAADAAALEHDKAYDQQLKAGDNPYLKYNHADAEFQERLKEDTSFGGNLGRAVFQAKKRLLEPLGLVEEAAKTAPGKKRPVEPSPQRSPDSSTGIGKKGQQPAKKRLNFGQTGDSESVPDPQPLGEPPATPAAVGPTTMASGGGAPMADNNEGADGVGNSSGNWHCDSQWLGDRVITTSTRTWALPTYNNHLYKQISSQSGASNDNHYFGYSTPWGYFDFNRFHCHFSPRDWQRLINNNWGFRPKRLNFKLFNIQVKEVTTNDGVTTIANNLTSTVQVFSDSEYQLPYVLGSAHQGCLPPFPADVFMIPQYGYLTLNNGSQAVGRSSFYCLEYFPSQMLRTGNNFTFSYTFEDVPFHSSYAHSQSLDRLMNPLIDQYLYYLSRTNTPSGTTTQSRLQFSQAGASDIRDQSRNWLPGPCYRQQRVSKTKTDNNNSNFTWTGASKYNLNGRESIINPGTAMASHKDDEDKFFPMSGVMIFGKESAGASNTALDNVMITDEEEIKATNPVATERFGTVAVNFQSSSTDPATGDVHVMGALPGMVWQDRDVYLQGPIWAKIPHTDGHFHPSPLMGGFGLKNPPPQILIKNTPVPANPPAEFSATKFASFITQYSTGQVSVEIEWELQKENSKRWNPEVQYTSNYAKSANVDFTVDNNGLYTEPRPIGTRYLTRPL

SEQ ID NO: 5232 - DNA, 2211 bp, Artificial Sequence
  Description of Artificial Sequence: Synthetic polynucleotide
atggctgccgatggttatcttccagattggctcgaggacaacctctctgagggcattcgcgagtggtgggacttgaaacctggagcccctaaacccaaggcaaatcaacaacatcaggacaacgctcgaggtcttgtgcttccgggttacaaataccttggacccggcaacggactcgacaagggggagccggtcaacgcagcagacgcggcggccctcgagcacgacaaggcctacgaccagcagctcaaggccggagacaacccgtacctcaagtacaaccacgccgacgccgagttccaggagcggctcaaagaagatacgtcttttgggggcaacctcgggcgagcagtcttccaggccaaaaagaggcttcttgaacctcttggtctggttgaggaagcggctaagacggctcctggaaagaagagaccggtagagccatcaccccagcgttctccagactcctctacgggcatcggcaagaaaggccaacagcccgctaaaaagagactcaattttggtcagactggcgactcagagtcagtccccgacccacaacctctcggagaacctccagcaacccccgctgctgtgggacctactacaatggcttcaggcggtggcgcaccaatggcagacaataacgagggtgccgatggagtgggtaattcctcaggaaattggcattgcgattcccaatggctgggcgacagagtcatcaccaccagcaccagaacctgggccctgcccacttacaacaaccatctctacaagcaaatctccagccaatcaggagcttcaaacgacaaccactactttggctacagcaccccttgggggtattttgactttaacagattccactgccacttttcaccacgtgactggcaaagactcatcaacaacaactggggattccgacccaagagactcaacttcaagctcttcaacatccaagtcaaggaggtcacgacgaatgatggcgtcacgaccatcgctaataaccttaccagcacggttcaagtcttctcggactcggagtaccagttgccgtacgtcctcggctctgcgcaccagggctgcctccctccgttcccggcggacgtgttcatgattccgcagtacggctacctaacgctcaacaatggcagccaagccgtgggacgttcatccttttactgcctggaatatttcccttctcagatgctgagaacgggcaacaactttaccttcagctacacttttgaggacgttcctttccacagcagctacgctcacagccagagtctggaccgtctcatgaatcccctcatcgaccagtacctgtattacttgagcagaacaaacactccaagtggaaccaccacgcagtcaaggcttcagttttctcaggccggagcgagtgacattcgggaccagtctaggaactggcttcctggaccctgttaccggcagcagcgcgtttctaaaacaaaaacagacaacaacaacagcaactttacctggactggtgcttcaaaatataaccttaatgggcgtgaatctataatcaaccctggcactgctatggcctcacacaaagacgacgaagacaagttctttcccatgagcggtgtcatgatttttggaaaggagagcgccggagcttcaaacactgcattggacaatgtcatgatcacagacgaagaggaaatcaaagccactaaccccgtggccaccgaaagatttgggactgtggcagtcaatctccagagcagcagcacagaccctgcgaccggagatgtgcatgttatgggagccttacctggaatggtgtggcaagacagagacgtgtacctgcagggtcctatttgggccaaaattcctcacacggatggacactttcacccgtctcctctcatgggcggctttggacttaagcacccgcctcctcagatcctcatcaaaaacacgcctgttcctgcgaatcctccggcagagttttcggctacaaagtttgcttcattcatcacccagtattccacaggacaagtgagtgtggaaattgaatgggagctgcagaaagaaaacagcaagcgctggaatcccgaagtgcagtacacatccaattatgcaaaatctgccaacgttgattttactgtggacaacaatggactttatactgagcctcgccccattggcacccgttacctcacccgtcccctgtaa

SEQ ID NO: 5233 - protein, 736 aa, Artificial Sequence
  Description of Artificial Sequence: Synthetic polypeptide
MAADGYLPDWLEDNLSEGIREWWDLKPGAPKPKANQQHQDNARGLVLPGYKYLGPGNGLDKGEPVNAADAAALEHDKAYDQQLKAGDNPYLKYNHADAEFQERLKEDTSFGGNLGRAVFQAKKRLLEPLGLVEEAAKTAPGKKRPVEPSPQRSPDSSTGIGKKGQQPAKKRLNFGQTGDSESVPDPQPLGEPPATPAAVGPTTMASGGGAPMADNNEGADGVGNSSGNWHCDSQWLGDRVITTSTRTWALPTYNNHLYKQISSQSGASNDNHYFGYSTPWGYFDFNRFHCHFSPRDWQRLINNNWGFRPKRLNFKLFNIQVKEVTTNDGVTTIANNLTSTVQVFSDSEYQLPYVLGSAHQGCLPPFPADVFMIPQYGYLTLNNGSQAVGRSSFYCLEYFPSQMLRTGNNFTFSYTFEDVPFHSSYAHSQSLDRLMNPLIDQYLYYLSRTNTPSGTTTQSRLQFSQAGASDIRDQSRNWLPGPCYRQQRVSKTKTDNNNSNFTWTGASKYNLNGRESIINPGTAMASHKDDEDKFFPMSGVMIFGKESAGASNTALDNVMITDEEEIKATNPVATERFGTVAVNLQSSSTDPATGDVHVMGALPGMVWQDRDVYLQGPIWAKIPHTDGHFHPSPLMGGFGLKHPPPQILIKNTPVPANPPAEFSATKFASFITQYSTGQVSVEIEWELQKENSKRWNPEVQYTSNYAKSANVDFTVDNNGLYTEPRPIGTRYLTRPL

SEQ ID NO: 5234 - DNA, 2214 bp, Artificial Sequence
  Description of Artificial Sequence: Synthetic polynucleotide
atggctgccgatggttatcttccagattggctcgaggacaaccttagtgaaggaattcgcgagtggtgggctttgaaacctggagcccctcaacccaaggcaaatcaacaacatcaagacaacgctcgaggtcttgtgcttccgggttacaaataccttggacccggcaacggactcgacaagggggagccggtcaacgcagcagacgcggcggccctcgagcacgacaaggcctacgaccagcagctgcaggcgggtgacaatccgtacctgcggtataaccacgccgacgccgagtttcaggagcgtctgcaagaagatacgtcttttgggggcaaccttggcagagcagtcttccaggccaaaaagaggatccttgagcctcttggtctggttgaggaagcagctaaaacggctcctggaaagaagaggcctgtagatcagtctcctcaggaaccggactcatcatctggtgttggcaaatcgggcaaacagcctgccagaaaaagactaaatttcggtcagactggcgactcagagtcagtcccagaccctcaacctctcggagaaccaccagcagcccccacaagtttgggatctaatacaatggcttcaggcggtggcgcaccaatggcagacaataacgagggtgccgatggggtgggtagttcctcgggaaattggcattgcgattcccaatgactgggggacagagtcatcaccaccagcacccgaacctgggccctgcccacctacaacaatcacctctacaagcaaatctccaacgggacatcgggaggagccaccaacgacaacacctacttcggctacagcaccccctgggggtattttgactttaacagattccactgccacttttcaccacgtgactggcagcgactcatcaacaacaactggggattccggcccaagagactcagcttcaagctcttcaacatccaggtcaaggaggtcacgcagaatgaaggcaccaagaccatcgccaataacctcaccagcaccatccaggtgtttacggactcggagtaccagctgccgtacgttctcggctctgcgcaccagggctgcctccctccgttcccggcggacgtgttcatgattccgcaatacggctacctgacgctcaacaatggcagccaagccgtgggacgttcatccttttactgcctggaatatttcccttctcagatgctgagaacgggcaacaactttaccttcagctacacctttgaggaagtgcctttccacagcagctacgcgcacagccagagcttggaccggctgatgaatcctctgattgaccagtacctgtactacttgtctcggactcaaacaacaggaggcacggcaaatacgcagactctgggcttcagccaaggtgggcctaatacaatggccaatcaggcaaagaactggctgccaggaccctgttaccgccaacaacgcgtctcaacgacaaccgggcaaaacaacaatagcaactttgcctggactgctgggaccaaataccatctgaatggaagaaattcattggctaatcctggcatcgctatggcaacacacaaagacgacgaggagcgtttttttcccagtaacgggatcctgatttttggcaaacaaaatgctgccagagacaatgcggattacagcgatgtcatgctcaccagcgaggaagaaatcaaaaccactaaccctgtggctacagaggaatacggtatcgtggcagataacttgcagcagcaaaacacggctcctcaaattggaactgtcaacagccagggggccttacccggtatggtctggcagaaccgggacgtgtacctgcagggtcccatctgggccaagattcctcacacggacggcaacttccacccgtctccgctgatgggcggctttggcctgaaacatcctccgcctcagatcctgatcaagaacacgcctgtacctgcggatcctccgaccaccttcaaccagtcaaagctgaactctttcatcacgcaatacagcaccggacaggtcagcgtggagatcgagtgggagctgcagaaggaaaacagcaagcgctggaacccggagatccagtacacttccaactattacaagtctaataatgttgaatttgctgttaatactgaaggtgtatatagtgaaccccgccccattggcaccagatacctgactcgtaatctgtaa

SEQ ID NO: 5235 - protein, 736 aa, Artificial Sequence
  Description of Artificial Sequence: Synthetic polypeptide
MAADGYLPDWLEDNLSEGIREWWALKPGAPQPKANQQHQDNARGLVLPGYKYLGPGNGLDKGEPVNAADAAALEHDKAYDQQLQAGDNPYLRYNHADAEFQERLQEDTSFGGNLGRAVFQAKKRILEPLGLVEEAAKTAPGKKRPVDQSPQEPDSSSGVGKSGKQPARKRLNFGQTGDSESVPDPQPLGEPPAAPTSLGSNTMASGGGAPMADNNEGADGVGSSSGNWHCDSQLGDRVITTSTRTWALPTYNNHLYKQISNGTSGGATNDNTYFGYSTPWGYFDFNRFHCHFSPRDWQRLINNNWGFRPKRLSFKLFNIQVKEVTQNEGTKTIANNLTSTIQVFTDSEYQLPYVLGSAHQGCLPPFPADVFMIPQYGYLTLNNGSQAVGRSSFYCLEYFPSQMLRTGNNFTFSYTFEEVPFHSSYAHSQSLDRLMNPLIDQYLYYLSRTQTTGGTANTQTLGFSQGGPNTMANQAKNWLPGPCYRQQRVSTTTGQNNNSNFAWTAGTKYHLNGRNSLANPGIAMATHKDDEERFFPSNGILIFGKQNAARDNADYSDVMLTSEEEIKTTNPVATEEYGIVADNLQQQNTAPQIGTVNSQGALPGMVWQNRDVYLQGPIWAKIPHTDGNFHPSPLMGGFGLKHPPPQILIKNTPVPADPPTTFNQSKLNSFITQYSTGQVSVEIEWELQKENSKRWNPEIQYTSNYYKSNNVEFAVNTEGVYSEPRPIGTRYLTRNL

SEQ ID NO: 5236 - DNA, 2214 bp, Artificial Sequence
  Description of Artificial Sequence: Synthetic polynucleotide
atggctgccgatggttatcttccagattggctcgaggacaaccttagtgaaggaattcgcgagtggtgggctttgaaacctggagcccctcaacccaaggcaaatcaacaacatcaagacaacgctcgaggtcttgtgcttccgggttacaaataccttggacccggcaacggactcgacaagggggagccggtcaacgcagcagacgcggcggccctcgagcacgacaaggcctacgaccagcagctgcaggcgggtgacaatccgtacctgcggtataaccacgccgacgccgagtttcaggagcgtctgcaagaagatacgtcttttgggggcaaccttggcagagcagtcttccaggccaaaaagaggatccttgagcctcttggtctggttgaggaagcagctaaaacggctcctggaaagaagaggcctgtagatcagtctcctcaggaaccggactcatcatctggtgttggcaaatcgggcaaacagcctgccagaaaaagactaaatttcggtcagactggcgactcagagtcagtcccagaccctcaacctctcggagaaccaccagcagcccccacaagtttgggatctaatacaatggcttcaggcggtggcgcaccaatggcagacaataacgagggtgccgatggggtgggtagttcctcgggaaattggcattgcgattcccaatggctgggggacagagtcatcaccaccagcacccgaacctgggccctgcccacctacaacaatcacctctacaagcaaatctccaacgggacatcgggaggagccaccaacgacaacacctacttcggctacagcaccccctgggggtattttgactttaacagattccactgccacttttcaccacgtgactggcagcgactcatcaacaacaactggggattccggcccaagagactcagcttcaagctcttcaacatccaggtcaaggaggtcacgcagaatgaaggcaccaagaccatcgccaataacctcaccagcaccatccaggtgtttacggactcggagtaccagctgccgtacgttctcggctctgcgcaccagggctgcctccctccgttcccggcggacgtgttcatgattccgcaatacggctacctgacgctcaacaatggcagccaagccgtgggacgttcatccttttactgcctggaatatttcccttctcagatgctgagaacgggcaacaactttaccttcagctacacctttgaggaagtgccttttcacagcagctacgcgcacagccagagcttggaccggctgatgaatcctctgattgaccagtacctgtactacttgtctcggactcaaacaacaggaggcacggcaaatacgcagactctgggcttcagccaaggtgggcctaatacaatggccaatcaggcaaagaactggctgccaggaccctgttaccgccaacaacgcgtctcaacgacaaccgggcaaaacaacaatagcaactttgcctggactgctgggaccaaataccatctgaatggaagaaattcattggctaatcctggcatcgctatggcaacacacaaagacgacgaggagcgtttttttcccagtaacgggatcctgatttttggcaaacaaaatgctgccagagacaatgcggattacagcgatgtcatgctcaccagcgaggaagaaatcaaaaccactaaccctgtggctacagaggaatacggtatcgtggcagataacttgcagcagcaaaacacggctcctcaaattggaactgtcaacagccagggggccttacccggtatggtctggcagaaccgggacgtgtacctgcagggtcccatctgggccaagattcctcacacggacggcaacttccacccgtctccgctgatgggcggctttggcctgaaacatcctccgcctcagatcctgatcaagaacacgcctgtacctgcggatcctccgaccaccttcaaccagtcaaagctgaactctttcatcacgcaatacagcaccggacaggtcagcgtggagatcgagtgggagctgcagaaggaaaacagcaagcgctggaacccggagatccagtacacttccaactattacaagtctaataatgttgaatttgctgttaatactgaaggtgtatatagtgaaccccgccccattggcaccagatacctgactcgtaatctgtaa

SEQ ID NO: 5237 - protein, 737 aa, Artificial Sequence; identical to SEQ ID NO: 5225
  Description of Artificial Sequence: Synthetic polypeptide

SEQ ID NO: 5238 - DNA, 2211 bp, Artificial Sequence
  Description of Artificial Sequence: Synthetic polynucleotide
atggctgccgatggttatcttccagattggctcgaggacaacctctctgagggcattcgcgagtggtgggacttgaaacctggagcccctaaacccaaggcaaatcaacaacatcaggacaacgctcgaggtcttgtgcttccgggttacaaataccttggacccggcaacggactcgacaagggggagccggtcaacgcagcagacgcggcggccctcgagcacgacaaggcctacgaccagcagctcaaggccggagacaacccgtacctcaagtacaaccacgccgacgccgagttccaggagcggctcaaagaagatacgtcttttgggggcaacctcgggcgagcagtcttccaggccaaaaagaggcttcttgaacctcttggtctggttgaggaagcggctaagacggctcctggaaagaagagaccggtagagccatcaccccagcgttctccagactcctctacgggcatcggcaagaaaggccaacagcccgctaaaaagagactcaattttggtcagactggcgactcagagtcagtccccgacccacaacctctcggagaacctccagcaacccccgctgctgtgggacctactacaatggcttcaggcggtggcgcaccaatggcagacaataacgagggtgccgatggagtgggtaattcctcaggaaattggcattgcgattcccaatggctgggcgacagagtcatcaccaccagcaccagaacctgggccctgcccacttacaacaaccatctctacaagcaaatctccagccaatcaggagcttcaaacgacaaccactactttggctacagcaccccttgggggtattttgactttaacagattccactgccacttttcaccacgtgactggcaaagactcatcaacaacaactggggattccgacccaagagactcaacttcaagctcttcaacatccaagtcaaggaggtcacgacgaatgatggcgtcacgaccatcgctaataaccttaccagcacggttcaagtcttctcggactcggagtaccagttgccgtacgtcctcggctctgcgcaccagggctgcctccctccgttcccggcggacgtgttcatgattccgcagtacggctacctaacgctcaacaatggcagccaagccgtgggacgttcatccttttactgcctggaatatttcccttctcagatgctgagaacgggcaacaactttaccttcagctacacttttgaggacgttcctttccacagcagctacgctcacagccagagtctggaccgtctcatgaatcctctcatcgaccagtacctgtattacttgagcagaacaaacactccaagtggaaccaccacgcagtcaaggcttcagttttctcaggccggagcgagtgacattcgggaccagtctaggaactggcttcctggaccctgttaccgccagcagcgcgtttctaaaacaaaaacagacaacaacaacagcaattttacctggactggtgcttcaaaatataaccttaatgggcgtgaatctataatcaaccctggcactgctatggcctcacacaaagacgacgaagacaagttctttcccatgagcggtgtcatgatttttggaaaagagagcgccggagcttcaaacactgcattggacaatgtcatgattacagacgaagaggaaattaaagccactaaccctgtggccaccgaaagatttgggaccgtggcagtcaatttccagagcagcagcacagaccctgcgaccggagatgtgcatgctatgggagcattacctggcatggtgtggcaagatagagacgtgtacctgcagggtcccatttgggccaaaattcctcacacagatggacactttcacccgtctcctcttatgggcggctttggactcaagaacccgcctcctcagatcctcatcaaaaacacgcctgttcctgcgaatcctccggcggagttttcagctacaaagtttgcttcattcatcacccaatactccacaggacaagtgagtgtggaaattgaatgggagctgcagaaagaaaacagcaagcgctggaatcccgaagtgcagtacacatccaattatgcaaaatctgccaacgttgattttactgtggacaacaatggactttatactgagcctcgccccattggcacccgttaccttacccgtcccctgtaa

SEQ ID NO: 5239 - protein, 736 aa, Artificial Sequence
  Description of Artificial Sequence: Synthetic polypeptide
MAADGYLPDWLEDNLSEGIREWWDLKPGAPKPKANQQHQDNARGLVLPGYKYLGPGNGLDKGEPVNAADAAALEHDKAYDQQLKAGDNPYLKYNHADAEFQERLKEDTSFGGNLGRAVFQAKKRLLEPLGLVEEAAKTAPGKKRPVEPSPQRSPDSSTGIGKKGQQPAKKRLNFGQTGDSESVPDPQPLGEPPATPAAVGPTTMASGGGAPMADNNEGADGVGNSSGNWHCDSQWLGDRVITTSTRTWALPTYNNHLYKQISSQSGASNDNHYFGYSTPWGYFDFNRFHCHFSPRDWQRLINNNWGFRPKRLNFKLFNIQVKEVTTNDGVTTIANNLTSTVQVFSDSEYQLPYVLGSAHQGCLPPFPADVFMIPQYGYLTLNNGSQAVGRSSFYCLEYFPSQMLRTGNNFTFSYTFEDVPFHSSYAHSQSLDRLMNPLIDQYLYYLSRTNTPSGTTTQSRLQFSQAGASDIRDQSRNWLPGPCYRQQRVSKTKTDNNNSNFTWTGASKYNLNGRESIINPGTAMASHKDDEDKFFPMSGVMIFGKESAGASNTALDNVMITDEEEIKATNPVATERFGTVAVNFQSSSTDPATGDVHAMGALPGMVWQDRDVYLQGPIWAKIPHTDGHFHPSPLMGGFGLKNPPPQILIKNTPVPANPPAEFSATKFASFITQYSTGQVSVEIEWELQKENSKRWNPEVQYTSNYAKSANVDFTVDNNGLYTEPRPIGTRYLTRPL

SEQ ID NO: 5240 - DNA, 2211 bp, Artificial Sequence
  Description of Artificial Sequence: Synthetic polynucleotide
atggctgccgatggttatcttccagattggctcgaggacaaccttagtgaaggaattcgcgagtggtgggcgctgaaacctggagccccgaagcccaaagccaaccagcaaaagcaggacgacggccggggtctggtgcttccgggttacaaatacctcggacccggtaacggactcgacaaaggagagccggtcaacgaggcggacgcggcagccctcgagcacgacaaggcctacgaccagcagctcaaagcgggtgacaatccgtacctgcggtataaccacgccgacgccgagtttcaggagcgtctgcaagaagatacgtcttttgggggcaacctcgggcgagcagtcttccaggccaagaagcgggttctcgaacctctcggtctggttgaggaaggcgctaagacggctcccggaaagaaacgtccggtagagcagtcgccacaagagccagactcctctacgggcatcggcaagaaaggccaacagcccgccagaaaaagactcaatttcggtcagactggcgactcagagtcagttccagaccctcaacctctcggagaacctccagcagcgccctctggtgtgggacctactacaatggcttcaggcggtggcgcaccaatggcagacaataacgaaggcgccgacggagtgggtaatgcctcaggaaattggcattgcgattccacatggctgggcgacagagtcatcaccaccagcacccgaacatgggccttgcccacctataacaaccacctctacaagcaaatctccagtgcttcaacgggggccagcaacgacaacacctacttcggctacagcaccccctgggggtattttgatttcaacagattccactgccatttctcaccacgtgactggcagcgactcatcaacaacaattggggattccggcccaagagactcaacttcaaactcttcaacatccaagtcaaggaggtcacgacgaatgatggcgtcacgaccatcgctaataaccttaccagcacggttcaagtcttctcggactcggagtaccagttgccgtacgtcctcggctctgcgcaccagggctgcctccctccgttcccggcggacgtgttcatgattccgcagtacggctacctaacgctcaacaatggcagccaggcagtgggacggtcatccttttactgcctggaatatttcccatcgcagatgctgagaacgggcaataactttaccttcagctacaccttcgaggacgtgcctttccacagcagctacgcgcacagccagagcctggaccggctgatgaatcctctcatcgaccagtacctgtattacctgaacagaactcagaatcagtccggaagtgcccaaaacaaggacttgctgtttagccgggggtctccagctggcatgtctgttcagcccaaaaactggctacctggaccctgttatcggcagcagcgcgtttctaaaacaaaaacagacaacaacaacagcaattttacctggactggtgcttcaaaatataacctcaatgggcgtgaatccatcatcaaccctggcactgctatggcctcacacaaagacgacgaagacaagttctttcccatgagcggtgtcatgatttttggaaaagagagcgccggagcttcaaacactgcattggacaatgtcatgattacagacgaagaggaaattaaagccactaaccctgtggccaccgaaagatttgggaccgtggcagtcaatttccagagcagcagcacagaccctgcgaccggagatgtgcatgttatgggagccttacctggaatggtgtggcaagacagagacgtatacctgcagggtcctatttgggccaaaattcctcacacagatggacactttcacccgtctcctcttatgggcggctttggactcaagaacccgcctcctcagatcctcatcaaaaacacgcctgttcctgcgaatcctccggcagagttttcggctacaaagtttgcttcattcatcacccagtattccacaggacaagtgagcgtggagattgaatgggagctgcagaaagaaaacagcaaacgctggaatcccgaagtgcagtatacatctaactatgcaaaatctgccaacgttgatttcactgtggacaacaatggactttatactgagcctcgccccattggcacccgttacctcacccgtcccctgtaa

SEQ ID NO: 5241 - protein, 736 aa, Artificial Sequence
  Description of Artificial Sequence: Synthetic polypeptide
MAADGYLPDWLEDNLSEGIREWWALKPGAPKPKANQQKQDDGRGLVLPGYKYLGPGNGLDKGEPVNEADAAALEHDKAYDQQLKAGDNPYLRYNHADAEFQERLQEDTSFGGNLGRAVFQAKKRVLEPLGLVEEGAKTAPGKKRPVEQSPQEPDSSTGIGKKGQQPARKRLNFGQTGDSESVPDPQPLGEPPAAPSGVGPTTMASGGGAPMADNNEGADGVGNASGNWHCDSTWLGDRVITTSTRTWALPTYNNHLYKQISSASTGASNDNTYFGYSTPWGYFDFNRFHCHFSPRDWQRLINNNWGFRPKRLNFKLFNIQVKEVTTNDGVTTIANNLTSTVQVFSDSEYQLPYVLGSAHQGCLPPFPADVFMIPQYGYLTLNNGSQAVGRSSFYCLEYFPSQMLRTGNNFTFSYTFEDVPFHSSYAHSQSLDRLMNPLIDQYLYYLNRTQNQSGSAQNKDLLFSRGSPAGMSVQPKNWLPGPCYRQQRVSKTKTDNNNSNFTWTGASKYNLNGRESIINPGTAMASHKDDEDKFFPMSGVMIFGKESAGASNTALDNVMITDEEEIKATNPVATERFGTVAVNFQSSSTDPATGDVHVMGALPGMVWQDRDVYLQGPIWAKIPHTDGHFHPSPLMGGFGLKNPPPQILIKNTPVPANPPAEFSATKFASFITQYSTGQVSVEIEWELQKENSKRWNPEVQYTSNYAKSANVDFTVDNNGLYTEPRPIGTRYLTRPL

SEQ ID NO: 5242 - DNA, 2205 bp, Artificial Sequence
  Description of Artificial Sequence: Synthetic polynucleotide
atggctgctgacggttatcttccagattggctcgaggacaacctttctgaaggcattcgtgagtggtgggctctgaaacctggagtccctcaacccaaagcgaaccaacaacaccaggacaaccgtcggggtcttgtgcttccgggttacaaatacctcggacccggtaacggactcgacaaaggagagccggtcaacgaggcggacgcggcagccctcgaacacgacaaggcctacgaccagcagctcaaggccggagacaacccgtacctcaagtacaaccacgccgacgccgagttccaggagcggctcaaagaagatacgtcttttgggggcaacctcgggcgagcagtcttccaggccaaaaagaggcttcttgaacctcttggtctggttgaggaagcggctaagacggctcctggaaagaagaggcctgtagagcagtctcctcaggaaccggactcctccgcgggtattggcaaatcgggtgcacagcccgctaaaaagagactcaatttcggtcagactggcgacacagagtcagtcccagaccctcaaccaatcggagaacctcccgcagccccctcaggtgtgggatctcttacaatggcttcaggtggtggcgcaccagtggcagacaataacgaaggtgccgatggagtgggtagttcctcgggaaattggcattgcgattcccaatggctgggggacagagtcatcaccaccagcacccgaacctgggccctgcccacctacaacaaccacctctacaaacaaatttccagccaatcaggagcctcgaacgacaatcactactttggctacagcaccccttgggggtattttgacttcaacagattccactgccacttttcaccacgtgactggcagcgactcatcaacaacaactggggattccggcccaagagactcagcttcaagctcttcaacatccaggtcaaagaggttacggacaacaatggagtcaagaccatcgccaataaccttaccagcacggtccaggtcttcacggactcagactatcagctcccgtacgtgctcgggtcggctcacgagggctgcctcccgccgttcccagcggacgttttcatgattcctcagtacgggtatctgacgcttaatgatggaagccaggccgtgggtcgttcgtccttttactgcctggaatatttcccgtcgcaaatgctaagaacgggtaacaacttccagttcagctacgagtttgagaacgtacctttccatagcagctacgctcacagccaaagcctggaccgactaatgaatccactcatcgaccaatacttgtactatctctcaaagactattaacggttctggacagaatcaacaaacgctaaaattcagtgtggccggacccagcaacatggctgtccagggaagaaactacatacctggacccagctaccgacaacaacgtgtctcaaccactgtgactcaaaacaacaacagcgaatttgcttggcctggagcttcttcttgggctctcaatggacgtaatagcttgatgaatcctggacctgctatggccagccacaaagaaggagaggaccgtttctttcctttgtctggatctttaatttttggcaaacaaggaactggaagagacaacgtggatgcggacaaagtcatgataaccaacgaagaagaaattaaaactactaacccggtagcaacggagtcctatggacaagtggccacaaaccaccagagtgcccaagcacaggcgcagaccggctgggttcaaaaccaaggaatacttccgggtatggtttggcaggacagagatgtgtacctgcaaggacccatctgggccaagattcctcacacggacggcaacttccacccgtctccgctgatgggcggctttggcctgaaacatcctccgcctcagatcctgatcaagaacacgcctgtacctgcggatcctccgaccaccttcaaccagtcaaagctgaactctttcatcacgcaatacagcaccggacaggtcagcgtggaaattgaatgggagctgcagaaggaaaacagcaagcgctggaatcccgaagtgcagtatacatctaactatgcaaaatctgccaacgttgatttcactgtggacaacaatggactttatactgagcctcgccccattggcacccgttacctcacccgtcccctgtaa

SEQ ID NO: 5243 - protein, 734 aa, Artificial Sequence
  Description of Artificial Sequence: Synthetic polypeptide
MAADGYLPDWLEDNLSEGIREWWALKPGVPQPKANQQHQDNRRGLVLPGYKYLGPGNGLDKGEPVNEADAAALEHDKAYDQQLKAGDNPYLKYNHADAEFQERLKEDTSFGGNLGRAVFQAKKRLLEPLGLVEEAAKTAPGKKRPVEQSPQEPDSSAGIGKSGAQPAKKRLNFGQTGDTESVPDPQPIGEPPAAPSGVGSLTMASGGGAPVADNNEGADGVGSSSGNWHCDSQWLGDRVITTSTRTWALPTYNNHLYKQISSQSGASNDNHYFGYSTPWGYFDFNRFHCHFSPRDWQRLINNNWGFRPKRLSFKLFNIQVKEVTDNNGVKTIANNLTSTVQVFTDSDYQLPYVLGSAHEGCLPPFPADVFMIPQYGYLTLNDGSQAVGRSSFYCLEYFPSQMLRTGNNFQFSYEFENVPFHSSYAHSQSLDRLMNPLIDQYLYYLSKTINGSGQNQQTLKFSVAGPSNMAVQGRNYIPGPSYRQQRVSTTVTQNNNSEFAWPGASSWALNGRNSLMNPGPAMASHKEGEDRFFPLSGSLIFGKQGTGRDNVDADKVMITNEEEIKTTNPVATESYGQVATNHQSAQAQAQTGWVQNQGILPGMVWQDRDVYLQGPIWAKIPHTDGNFHPSPLMGGFGLKHPPPQILIKNTPVPADPPTTFNQSKLNSFITQYSTGQVSVEIEWELQKENSKRWNPEVQYTSNYAKSANVDFTVDNNGLYTEPRPIGTRYLTRPL

SEQ ID NO: 5244 - DNA, 2211 bp, Artificial Sequence
  Description of Artificial Sequence: Synthetic polynucleotide
atggctgccgatggttatcttccagattggctcgaggacaacctctctgagggcattcgcgagtggtgggcgctgaaacctggagccccgaagcccaaagccaaccagcaaaagcaggacgacggccggggtctggtgcttcctggctacaagtacctcggacccttcaacggactcgacaagggggagcccgtcaacgcggcggacgcagcggccctcgagcacgacaaggcctacgaccagcagctgcaggcgggtgacaatccgtacctgcggtataaccacgccgacgccgagtttcaggagcgtctgcaagaagatacgtcttttgggggcaacctcgggcgagcagtcttccaggccaagaagtgggttctcgaacctctcggtctggttgaggaaggcgctaagacggctcctggaaagaaacgtccggtagagcagtcgccacaagagccagactcctcctcgggcatcggcaagacaggccagcagcccgctaaaaagagactcaattttggtcagactggcgactcagagtcagtccccgacccacaacctctcggagaacctccagcaacccccgctgctgtgggacctactacaatggcttcaggcggtggcgcaccaatggcagacaataacgaaggcgccgacggagtgggtaatgcctcaggaaattggcattgcgattccacatggctgggcgacagagtcatcaccaccagcacccgcacctgggccttgcccacctacaataaccacctctacaagcaaatctccagtgcttcaacgggggccagcaacgacaaccactacttcggctacagcaccccctgggggtattttgatttcaacagattccactgccatttctcaccacgtgactggcagcgactcatcaacaacaattggggattccggcccaagagactcaacttcaagctcttcaacatccaagtcaaggaggtcacgacgaatgatggcgtcacaaccatcgctaataaccttaccagcacggttcaagtcttctcggactcggagtaccagcttccgtacgtcctcggctctgcgcaccagggctgcctccctccgttcccggcggacgtgttcatgattccgcaatacggctacctgacgctcaacaatggcagccaagccgtgggacgttcatccttttactgcctggaatatttcccttctcagatgctgagaacgggcaacaactttaccttcagctacacctttgaggaagtgcctttccacagcagctacgcgcacagccagagcctggaccggctgatgaatcctctcatcgaccaatacctgtattacctgaacagaactcaaaatcagtccggaagtgcccaaaacaaggacttgctgtttagccgtgggtctccagctggcatgtctgttcagcccaaaaactggctacctggaccctgttatcggcagcagcgcgtttctaaaacaaaaacagacaacaacaacagcaattttacctggactggtgcttcaaaatataacctcaatgggcgtgaatccatcatcaaccctggcactgctatggcctcacacaaagacgacgaagacaagttctttcccatgagcggtgtcatgatttttggaaaggagagcgccggagcttcaaacactgcattggacaatgtcatgatcaccgacgaagaggaaatcaaagccactaaccccgtggccaccgaaagatttgggactgtggcagtcaatctccagagcagcagcacagaccctgcgaccggagatgtgcatgttatgggagccttacctggcatggtgtggcaagatagagacgtgtacctgcagggtcccatttgggccaaaattcctcacacagatggacactttcacccgtctcctcttatgggcggctttggactcaagaacccgcctcctcagatcctcatcaaaaacacgcctgttcctgcgaatcctccggcggagttttcagctacaaagtttgcttcattcatcacccaatactccacaggacaagtgagtgtggaaattgaatgggagctgcagaaagaaaacagcaagcgctggaatcccgaagtgcagtacacatccaattatgcaaaatctgccaacgttgattttactgtggacaacaatggactttatactgagcctcgccccattggcacccgttacctcacccgtcccctgtaa

SEQ ID NO: 5245 - protein, 736 aa, Artificial Sequence
  Description of Artificial Sequence: Synthetic polypeptide
MAADGYLPDWLEDNLSEGIREWWALKPGAPKPKANQQKQDDGRGLVLPGYKYLGPFNGLDKGEPVNAADAAALEHDKAYDQQLQAGDNPYLRYNHADAEFQERLQEDTSFGGNLGRAVFQAKKWVLEPLGLVEEGAKTAPGKKRPVEQSPQEPDSSSGIGKTGQQPAKKRLNFGQTGDSESVPDPQPLGEPPATPAAVGPTTMASGGGAPMADNNEGADGVGNASGNWHCDSTWLGDRVITTSTRTWALPTYNNHLYKQISSASTGASNDNHYFGYSTPWGYFDFNRFHCHFSPRDWQRLINNNWGFRPKRLNFKLFNIQVKEVTTNDGVTTIANNLTSTVQVFSDSEYQLPYVLGSAHQGCLPPFPADVFMIPQYGYLTLNNGSQAVGRSSFYCLEYFPSQMLRTGNNFTFSYTFEEVPFHSSYAHSQSLDRLMNPLIDQYLYYLNRTQNQSGSAQNKDLLFSRGSPAGMSVQPKNWLPGPCYRQQRVSKTKTDNNNSNFTWTGASKYNLNGRESIINPGTAMASHKDDEDKFFPMSGVMIFGKESAGASNTALDNVMITDEEEIKATNPVATERFGTVAVNLQSSSTDPATGDVHVMGALPGMVWQDRDVYLQGPIWAKIPHTDGHFHPSPLMGGFGLKNPPPQILIKNTPVPANPPAEFSATKFASFITQYSTGQVSVEIEWELQKENSKRWNPEVQYTSNYAKSANVDFTVDNNGLYTEPRPIGTRYLTRPL

SEQ ID NO: 5246 - DNA, 2214 bp, Artificial Sequence
  Description of Artificial Sequence: Synthetic polynucleotide
atggctgccgatggttatcttccagattggctcgaggacaaccttagtgaaggaattcgcgagtggtgggctttgaaacctggagcccctcaacccaaggcaaatcaacaacatcaagacaacgctcgaggtcttgtgcttccgggttacaaataccttggacccggcaacggactcgacaagggggagccggtcaacgcagcagacgcggcggccctcgagcacgacaaggcctacgaccagcagctgcaggcgggtgacaatccgtacctgcggtataaccacgccgacgccgagtttcaggagcgtctgcaagaagatacgtcttttgggggcaaccttggcagagcagtcttccaggccaaaaagaggatccttgagcctcttggtctggttgaggaagcagctaaaacggctcctggaaagaagaggcctgtagatcagtctcctcaggaaccggactcatcatctggtgttggcaaatcgggcaaacagcctgccagaaaaagactaaatttcggtcagactggcgactcagagtcagtcccagaccctcaacctctcggagaaccaccagcagcccccacaagtttgggatctaatacaatggcttcaggcggtggcgcaccaatggcagacaataacgagggtgccgatggggtgggtagttcctcgggaaattggcattgcgattcccaatggctgggggacagagtcatcaccaccagcacccgaacctgggccctgcccacctacaacaatcacctctacaagcaaatctccaacgggacatcgggaggagccaccaacgacaacacctacttcggctacagcaccccctgggggtattttgactttaacagattccactgccacttttcaccacgtgactggcagcgactcatcaacaacaactggggattccggcccaagagactcagcttcaagctcttcaacatccaggtcaaggaggtcacgcagaatgaaggcaccaagaccatcgccaataacctcaccagcaccatccaggtgtttacggactcggagtaccagctgccgtacgttctcggctcggcgcaccagggctgcctccctccgttcccggcggacgtcttcatggtgccacagtatggatacctgacgctcaacaatggcagccaagccgtgggacgttcatccttttactgcctggaatatttcccttctcagatgctgagaacgggcaacaactttaccttcagctacacctttgaggaagtgcctttccacagcagctacgcgcacagccagagcttggaccggctgatgaatcctctgattgaccagtacctgtactacttgtctcggactcaaacaacaggaggcacggcaaatacgcagactctgggcttcagccaaggtgggcctaatacaatggccaatcaggcaaagaactggctgccaggaccctgttaccgccaacaacgcgtctcaacgacaaccgggcaaaacaacaatagcaactttgcctggactgctgggaccaaataccatctgaatggaagaaattcattggctaatcctggcatcgctatggcaacacacaaagacgacgaggagcgtttttttcccagtaacgggatcctgatttttggcaaacaaaatgctgccagagacaatgcggattacagcgatgtcatgctcaccagcgaggaagaaatcaaaaccactaaccctgtggctacagaggaatacggtatcgtggcagataacttgcagcagcaaaacacggctcctcaaattggaactgtcaacagccagggggacttacccggtatggtctggcagaaccgggacgtgtacctgcagggtcccatctgggccaagattcctcacacggacggcaacttccacccgtctccgctgatgggcggctttggcctgaaacatcctccgcctcagatcctgatcaagaacacgcctgtacctgcggatcctccgaccaccttcaaccagtcaaagctgaactctttcatcacgcaatacagcaccggacaggtcagcgtggagatcgagtgggagctgcagaaggaaaacagcaagcgctggaacccggagatccagtacacttccaactattacaagtctaataatgttgaatttgctgttaatactgaaggtgtatatagtgaaccccgccccattggcaccagatacctgactcgtaatctgtaa

SEQ ID NO: 5247 - protein, 737 aa, Artificial Sequence
  Description of Artificial Sequence: Synthetic polypeptide
MAADGYLPDWLEDNLSEGIREWWALKPGAPQPKANQQHQDNARGLVLPGYKYLGPGNGLDKGEPVNAADAAALEHDKAYDQQLQAGDNPYLRYNHADAEFQERLQEDTSFGGNLGRAVFQAKKRILEPLGLVEEAAKTAPGKKRPVDQSPQEPDSSSGVGKSGKQPARKRLNFGQTGDSESVPDPQPLGEPPAAPTSLGSNTMASGGGAPMADNNEGADGVGSSSGNWHCDSQWLGDRVITTSTRTWALPTYNNHLYKQISNGTSGGATNDNTYFGYSTPWGYFDFNRFHCHFSPRDWQRLINNNWGFRPKRLSFKLFNIQVKEVTQNEGTKTIANNLTSTIQVFTDSEYQLPYVLGSAHQGCLPPFPADVFMVPQYGYLTLNNGSQAVGRSSFYCLEYFPSQMLRTGNNFTFSYTFEEVPFHSSYAHSQSLDRLMNPLIDQYLYYLSRTQTTGGTANTQTLGFSQGGPNTMANQAKNWLPGPCYRQQRVSTTTGQNNNSNFAWTAGTKYHLNGRNSLANPGIAMATHKDDEERFFPSNGILIFGKQNAARDNADYSDVMLTSEEEIKTTNPVATEEYGIVADNLQQQNTAPQIGTVNSQGDLPGMVWQNRDVYLQGPIWAKIPHTDGNFHPSPLMGGFGLKHPPPQILIKNTPVPADPPTTFNQSKLNSFITQYSTGQVSVEIEWELQKENSKRWNPEIQYTSNYYKSNNVEFAVNTEGVYSEPRPIGTRYLTRNL

SEQ ID NO: 5248 - DNA, 2205 bp, Artificial Sequence
  Description of Artificial Sequence: Synthetic polynucleotide
atggctgctgacggttatcttccagattggctcgaggacaacctttctgaaggcattcgtgagtggtgggctctgaaacctggagtccctcaacccaaagcgaaccaacaacaccaggacaactgtcggggtcttgtgcttccgggttacaaatacctcggacccggtaacggactcgacaaaggagagccggtcaacgaggcggacgcggcagccctcgaacacgacaaggcctacgaccagcagctcaaggccggagacaacccgtacctcaagtacaaccacgccgacgccgagttccaggagcggctcaaagaagatacgtcttttgggggcaacctcgggcgagcagtcttccagaccaaaaagaggcttcttgaacctcttggtctggttgaggaagcggctaagacggctcctggaaagaagaggcctgtagagcagtctcctcaggaaccggactcctccgcgggtattggcaaatcgggtgcacagcccgctaaaaagagactcaatttcggtcagactggcgacacagagtcagtcccagaccctcaaccaatcggagaacctcccgcagccccctcaggtgtgggatctcttacaatggcttcaggtggtggcgcaccagtggcagacaataacgaaggtgccgatggagtgggtagttcctcgggaaattggcattgcgattcccaatggctgggggacagagtcatcaccaccagcacccgaacctgggccctgcccacctacaacaaccacctctacaaacaaatttccagccaatcaggagcctcgaacgacaatcactactttggctacagcaccccttgggggtattttgacttcaacagattccactgccacttttcaccacgtgactggcagcgactcatcaacaacaactggggattccggcccaagagactcagcttcaagctcttcaacatccaggtcaaagaggttacggacaacaatggagtcaagaccatcgccaataaccttaccagcacggtccaggtcttcacggactcagactatcagctcccgtacgtgctcgggtcggctcacgagggctgcctcccgccgttcccagcggacgttttcatgattcctcagtacgggtatctgacgcttaatgatggaagccaggccgtgggtcgttcgtccttttactgcctggaatatttcccgtcgcaaatgctaagaacgggtaacaacttccagttcagctacgagtttgagaacgtacctttccatagcagctacgctcacagccaaagcctggaccgactaatgaatccactcatcgaccaatacttgtactatctctcaaagactattaacggttctggacagaatcaacaaacgctaaaattcagtgtggccggacccagcaacatggctgtccagggaagaaactacatacctggacccagctaccgacaacaacgtgtctcaaccactgtgactcaaaacaacaacagcgaatttgcttggcctggagcttcttcttgggctctcaatggacgtaatagcttgatgaatcctggacctgctatggccagccacaaagaaggagaggaccgtttctttcctttgtctggatctttaatttttggcaaacaaggaactggaagagacaacgtggatgcggacaaagtcatgataaccaacgaagaagaaattaaaactactaacccggtagcaacggagtcctatggacaagtggccacaaaccaccagagtgcccaagcacaggcgcagaccggctgggttcaaaaccaaggaatacttccgggtatggtttggcaggacagagatgtgtacctgcaaggacccatctgggccaagattcctcacacggacggcaacttccacccgtctccgctgatgggcggctttggcctgaaacatcctccgcctcagatcctgatcaagaacacgcctgttcctgcgaatcctccggcggagttttcagctacaaagtttgcttcattcatcacccagtactccacaggacaagtgagtgtggaaattgaatgggagctgcagaaagaaaacagcaagcgctggaatcccgaagtgcagtacacatccaattatgcaaaatctgccaacgttgattttactgtggacaacaatggactttatactgagcctcgccccattggcacccgttaccttaccaaacctctgtaa

SEQ ID NO: 5249 - protein, 734 aa, Artificial Sequence
  Description of Artificial Sequence: Synthetic polypeptide
MAADGYLPDWLEDNLSEGIREWWALKPGVPQPKANQQHQDNCRGLVLPGYKYLGPGNGLDKGEPVNEADAAALEHDKAYDQQLKAGDNPYLKYNHADAEFQERLKEDTSFGGNLGRAVFQTKKRLLEPLGLVEEAAKTAPGKKRPVEQSPQEPDSSAGIGKSGAQPAKKRLNFGQTGDTESVPDPQPIGEPPAAPSGVGSLTMASGGGAPVADNNEGADGVGSSSGNWHCDSQWLGDRVITTSTRTWALPTYNNHLYKQISSQSGASNDNHYFGYSTPWGYFDFNRFHCHFSPRDWQRLINNNWGFRPKRLSFKLFNIQVKEVTDNNGVKTIANNLTSTVQVFTDSDYQLPYVLGSAHEGCLPPFPADVFMIPQYGYLTLNDGSQAVGRSSFYCLEYFPSQMLRTGNNFQFSYEFENVPFHSSYAHSQSLDRLMNPLIDQYLYYLSKTINGSGQNQQTLKFSVAGPSNMAVQGRNYIPGPSYRQQRVSTTVTQNNNSEFAWPGASSWALNGRNSLMNPGPAMASHKEGEDRFFPLSGSLIFGKQGTGRDNVDADKVMITNEEEIKTTNPVATESYGQVATNHQSAQAQAQTGWVQNQGILPGMVWQDRDVYLQGPIWAKIPHTDGNFHPSPLMGGFGLKHPPPQILIKNTPVPANPPAEFSATKFASFITQYSTGQVSVEIEWELQKENSKRWNPEVQYTSNYAKSANVDFTVDNNGLYTEPRPIGTRYLTKPL

SEQ ID NO: 5250 - DNA, 2211 bp, Artificial Sequence
  Description of Artificial Sequence: Synthetic polynucleotide
atggctgccgatggttatcttccagattggctcgaggacaacctctctgagggcattcgcgagtggtgggacttgaaacctggagcccctaaacccaaggcaaatcaacaacatcaggacaacgctcgaggtcttgtgcttccgggttacaaataccttggacccggcaacggactcgacaagggggagccggtcaacgcagcagacgcggcggccctcgagcacgacaaggcctacgaccagcagctcaaggccggagacaacccgtacctcaagtacaaccacgccgacgccgagttccaggagcggctcaaagaagatacgtcttttgggggcaacctcgggcgagcagtcttccaggccaaaaagaggcttcttgaacctcttggtctggttgaggaagcggctaagacggctcctggaaagaagagaccggtagagccatcaccccagcgttctccagactcctctacgggcatcggcaagaaaggccaacagcccgctaaaaagagactcaattttggtcagactggcgactcagagtcagtccccgacccacaacctctcggagaacctccagcaacccccgctgctgtgggacctactacaatggcttcaggcggtggcgcaccaatggcagacaataacgagggtgccgatggagtgggtaattcctcaggaaattggcattgcgattcccaatggctgggcgacagagtcatcaccaccagcaccagaacctgggccctgcccacttacaacaaccatctctacaagcaaatctccagccaatcaggagcttcaaacgacaaccactactttggctacagcaccccttgggggtattttgactttaacagattccactgccacttttcaccacgtgactggcaaagactcatcaacaacaactggggattccgacccaagagactcaacttcaagctcttcaacatccaagtcaaggaggtcacgacgaatgatggcgtcacgaccatcgctaataaccttaccagcacggttcaagtcttctcggactcggagtaccagttgccgtacgtcctcggctctgcgcaccagggctgcctccctccgttcccggcggacgtgttcatgattccgcagtacggctacctaacgctcaacaatggcagccaagccgtgggacgttcatccttttactgcctggaatatttcccttctcagatgctgagaacgggcaacaactttaccttcagctacacttttgaggacgttcctttccacagcagctacgctcacagccagagtctggaccgtctcatgaatcctctcatcgaccagtacctgtattacttgagcagaacaaacactccaagtggaaccaccacgcagtcaaggcttcagttttctcaggccggagcgagtgacattcgggaccagtctaggaactggcttcctggaccctgttaccgccagcagcgcgtttctaaaacaaaaacagacaacaacaacagcaattttacctggactggtgcttcaaaatataaccttaatgggcgtgaatctataatcaaccctggcactgctatggcctcacacaaagacgacgaagacaagttctttcccatgagcggtgtcatgatttttggaaaagagagcgccggagcttcaaacactgcattggacaatgtcatgatcacagacgaagaggaaatcaaagccactaaccccgtggccaccgaaagatttgggactgtggcagtcaatctccagagcagcagcacagaccctgcgaccggagatgtgcatgttatgggagcattacctggcatggtgtggcaagatagagacgtgtacctgcagggtcccatttgggccaaaattcctcacacagatggacactttcacccgtctcctcttatgggcggctttggactcaagaacccgcctcctcagatcctcatcaaaaacacgcctgttcctgcgaatcctccggcggagttttcagctacaaagtttgcttcattcatcacccaatactccacaggacaagtgagtgtggaaattgaatgggagctgcagaaagaaaacagcaagcgctggaatcccgaagtgcagtacacatccaattatgcaaaatctgccaacgttgattttactgtggacaacaatggactttatactgagcctcgccccattggcacccgttaccttacccgtcccctgtaa

SEQ ID NO: 5251 - protein, 736 aa, Artificial Sequence
  Description of Artificial Sequence: Synthetic polypeptide
MAADGYLPDWLEDNLSEGIREWWDLKPGAPKPKANQQHQDNARGLVLPGYKYLGPGNGLDKGEPVNAADAAALEHDKAYDQQLKAGDNPYLKYNHADAEFQERLKEDTSFGGNLGRAVFQAKKRLLEPLGLVEEAAKTAPGKKRPVEPSPQRSPDSSTGIGKKGQQPAKKRLNFGQTGDSESVPDPQPLGEPPATPAAVGPTTMASGGGAPMADNNEGADGVGNSSGNWHCDSQWLGDRVITTSTRTWALPTYNNHLYKQISSQSGASNDNHYFGYSTPWGYFDFNRFHCHFSPRDWQRLINNNWGFRPKRLNFKLFNIQVKEVTTNDGVTTIANNLTSTVQVFSDSEYQLPYVLGSAHQGCLPPFPADVFMIPQYGYLTLNNGSQAVGRSSFYCLEYFPSQMLRTGNNFTFSYTFEDVPFHSSYAHSQSLDRLMNPLIDQYLYYLSRTNTPSGTTTQSRLQFSQAGASDIRDQSRNWLPGPCYRQQRVSKTKTDNNNSNFTWTGASKYNLNGRESIINPGTAMASHKDDEDKFFPMSGVMIFGKESAGASNTALDNVMITDEEEIKATNPVATERFGTVAVNLQSSSTDPATGDVHVMGALPGMVWQDRDVYLQGPIWAKIPHTDGHFHPSPLMGGFGLKNPPPQILIKNTPVPANPPAEFSATKFASFITQYSTGQVSVEIEWELQKENSKRWNPEVQYTSNYAKSANVDFTVDNNGLYTEPRPIGTRYLTRPL

SEQ ID NO: 5252 - DNA, 2214 bp, Artificial Sequence; identical to SEQ ID NO: 5224
  Description of Artificial Sequence: Synthetic polynucleotide

SEQ ID NO: 5253 - protein, 737 aa, Artificial Sequence; identical to SEQ ID NO: 5225
  Description of Artificial Sequence: Synthetic polypeptide

SEQ ID NO: 5254 - DNA, 2205 bp, Artificial Sequence
  Description of Artificial Sequence: Synthetic polynucleotide
atggctgctgacggttatcttccagattggctcgaggacaacctttctgaaggcattcgtgagtggtgggctctgaaacctggagtccctcaacccaaagcgaaccaacaacaccaggacaaccgtcggggtcttgtgcttccgggttacaaatacctcggacccggtaacggactcgacaaaggagagccggtcaacgaggcggacgcggcagccctcgaacacgacaaggcctacgaccagcagctcaaggccggagacaacccgtacctcaagtacaaccacgccgacgccgagttccaggagcggctcaaagaagatacgtcttttgggggcaacctcgggcgagcagtcttccaggccaaaaagaggcttcttgaacctcttggtctggttgaggaagcggctaagacggctcctggaaagaagaggcctgtagagcagtctcctcaggaaccggactcctccgcgggtattggcaaatcgggtgcacagcccgctaaaaagagactcaatttcggtcagactggcgacacagagtcagtcccagaccctcaaccaatcggagaacctcccgcagccccctcaggtgtgggatctcttacaatggcttcaggtggtggcgcaccagtggcagacaataacgaaggtgccgatggagtgggtagttcctcgggaaattggcattgcgattcccaatggctgggggacagagtcatcaccaccagcacccgaacctgggccctgcccacctacaacaaccacctctacaaacaaatttccagccaatcaggagcctcgaacgacaatcactactttggctacagcaccccttgggggtattttgacttcaacagattccactgccacttttcaccacgtgactggcagcgactcatcaacaacaactggggattccggcccaagagactcagcttcaagctcttcaacatccaggtcaaagaggttacggacaacaatggagtcaagaccatcgccaataaccttaccagcacggtccaggtcttcacggactcagactatcagctcccgtacgtgctcgggtcggctcacgagggctgcctcccgccgttcccagcggacgttttcatgattcctcagtacgggtatctgacgcttaatgatggaagccaggccgtgggtcgttcgtccttttactgcctggaatatttcccgtcgcaaatgctaagaacgggtaacaacttccagttcagctacgagtttgagaacgtacctttccatagcagctacgctcacagccaaagcctggaccgactaatgaatccactcatcgaccaatacttgtactatctctcaaagactattaacggttctggacagaatcaacaaacgctaaaattcagtgtggccggacccagcaacatggctgtccagggaagaaactacatacctggacccagctaccgacaacaacgtgtctcaaccactgtgactcaaaacaacaacagcgaatttgcttggcctggagcttcttcttgggctctcaatggacgtaatagcttgatgaatcctggacctgctatggccagccacaaagaaggagaggaccgtttctttcctttgtctggatctttaatttttggcaaacaaggaactggaagagacaacgtggatgcggacaaagtcatgataaccaacgaagaagaaattaaaactactaacccggtagcaacggagtcctatggacaagtggccacaaaccaccagagtgcccaagcacaggcgcagaccggctgggttcaaaaccaaggaatacttccgggtatggtttggcaggacagagatgtgtacctgcaaggacccatttgggccaaaattcctcacacggacggcaactttcacccttctccgctgatgggagggtttggaatgaaacacccgcctcctcagatcctcatcaaaaacacacctgtacctgcggatcctccaacggccttcaacaaggacaagctgaactctttcatcacccagtattctactggccaagtcagcgtggagatcgagtgggagctgcagaaggaaaacagcaagcgctggaaccccgagatccagtacacctccaactactacaaatctacaagtgtggactttgctgttaatacagaaggcgtgtactctgaaccccgccccattggcacccgttacctcacccgtaatctgtaa

SEQ ID NO: 5255 - protein, 734 aa, Artificial Sequence
  Description of Artificial Sequence: Synthetic polypeptide
MAADGYLPDWLEDNLSEGIREWWALKPGVPQPKANQQHQDNRRGLVLPGYKYLGPGNGLDKGEPVNEADAAALEHDKAYDQQLKAGDNPYLKYNHADAEFQERLKEDTSFGGNLGRAVFQAKKRLLEPLGLVEEAAKTAPGKKRPVEQSPQEPDSSAGIGKSGAQPAKKRLNFGQTGDTESVPDPQPIGEPPAAPSGVGSLTMASGGGAPVADNNEGADGVGSSSGNWHCDSQWLGDRVITTSTRTWALPTYNNHLYKQISSQSGASNDNHYFGYSTPWGYFDFNRFHCHFSPRDWQRLINNNWGFRPKRLSFKLFNIQVKEVTDNNGVKTIANNLTSTVQVFTDSDYQLPYVLGSAHEGCLPPFPADVFMIPQYGYLTLNDGSQAVGRSSFYCLEYFPSQMLRTGNNFQFSYEFENVPFHSSYAHSQSLDRLMNPLIDQYLYYLSKTINGSGQNQQTLKFSVAGPSNMAVQGRNYIPGPSYRQQRVSTTVTQNNNSEFAWPGASSWALNGRNSLMNPGPAMASHKEGEDRFFPLSGSLIFGKQGTGRDNVDADKVMITNEEEIKTTNPVATESYGQVATNHQSAQAQAQTGWVQNQGILPGMVWQDRDVYLQGPIWAKIPHTDGNFHPSPLMGGFGMKHPPPQILIKNTPVPADPPTAFNKDKLNSFITQYSTGQVSVEIEWELQKENSKRWNPEIQYTSNYYKSTSVDFAVNTEGVYSEPRPIGTRYLTRNL

SEQ ID NO: 5256 - DNA, 2217 bp, Artificial Sequence
  Description of Artificial Sequence: Synthetic polynucleotide
atggctgccgatggttatcttccagattggctcgaggacaacctctctgagggcattcgcgagtggtgggcgctgaaacctggagccccgaagcccaaagccaaccagcaaaagcaggacgacggccggggtctggtgcttcctggctacaagtacctcggacccttcaacggactcgacaagggggagcccgtcaacgcggcggacgcagcggccctcgagcacgacaaggcctacgaccagcagctgcaggcgggtgacaatccgtacctgcggtataaccacgccgacgccgagtttcaggagcgtctgcaagaagatacgtcttttgggggcaacctcgggcgagcagtcttccaggccaagaagcgggttctcgaacctctcggtctggttgaggaaggcgctaagacggctcctggaaagaagagaccggtagagccatcaccccagcgttctccagactcctctacgggcatcggcaagaaaggccaacagcccgccagaaaaagactcaattttggtcagactggcgactcagagtcagttccagaccctcaacctctcggagaacctccagcagcgccctctggtgtgggacctaatacaatggctgcaggcggtggcgcaccaatggcagacaataacgaaggcgccgacggagtgggtagttcctcgggaaattggcattgcgattccacatggctgggcgacagagtcatcaccaccagcacccgaacctgggccctgcccacctacaacaaccacctctacaagcaaatctccaacgggacatcgggaggagccaccaacgacaacacctacttcggctacagcaccccctgggggtattttgactttaacagattccactgccacttttcaccacgtgactggcagcgactcatcaacaacaactggggattccggcccaagagactcagcttcaagctcttcaacatccaggtcaaggaggtcacgcagaatgaaggcaccaagaccatcgccaataacctcaccagcaccatccaggtgtttacggactcggagtaccagctgccgtacgttctcggctctgcccaccagggctgcctgcctccgttcccggcggacgtgttcatgattccccagtacggctacctaacactcaacaacggtagtcaggccgtgggacgctcctccttctactgcctggaatactttccttcgcagatgctgagaaccggcaacaacttccagtttacttacaccttcgaggacgtgcctttccacagcagctacgcccacagccagagcttggaccggctgatgaatcctctgattgaccagtacctgtactacttgtctcggactcaaacaacaggaggcacggcaaatacgcagactctgggcttcagccaaggtgggcctaatacaatggccaatcaggcaaagaactggctgccaggaccctgttaccgccaacaacgcgtctcaacgacaaccgggcaaaacaacaatagcaactttgcctggactgctgggaccaaataccatctgaatggaagaaattcattggctaatcctggcatcgctatggcaacacacaaagacgacgaggagcgtttttttcccagtaacgggatcctgatttttggcaaacaaaatgctgccagagacaatgcggattacagcgatgtcatgctcaccagcgaggaagaaatcaaaaccactaaccctgtggctacagaggaatacggtatcgtggcagataacttgcagcagcaaaacacggctcctcaaattggaactgtcaacagccagggggccttacccggtatggtctggcagaaccgggacgtgtacctgcagggtcccatctgggccaagattcctcacacggacggcaacttccacccctctcccctcatgggtggattcggacttaaacatcctccgcctcagatcctgatcaagaacacgcctgtacctgcggatcctccgaccaccttcaaccagtcaaagctgaactctttcatcacgcaatacagcaccggacaggtcagcgtggaaattgaatgggagctgcagaaggaaaacagcaagcgctggaaccccgagatccagtacacctccaactactacaaatctacaagtgtggactttgctgttaatacagaaggcgtgtactctgaaccccgccccattggcacccgttacctcacccgtaatctgtaa

SEQ ID NO: 5257 - protein, 738 aa, Artificial Sequence; identical to SEQ ID NO: 5159
  Description of Artificial Sequence: Synthetic polypeptide

SEQ ID NO: 5258 - DNA, 2211 bp, Artificial Sequence
  Description of Artificial Sequence: Synthetic polynucleotide
atggctgctgacggttatcttccagattggctcgaggacaacctttctgaaggcattcgagagtggtgggcgctgcaacctggagcccctaaacccaaggcaaatcaacaacatcaggacaacgctcggggtcttgtgcttccgggttacaaatacctcggacccggcaacggactcgacaagggggaacccgtcaacgcagcggacgcggcagccctcgagcacgacaaggcctacgaccagcagctcaaggccggtgacaacccctacctcaagtacaaccacgccgacgccgagttccaggagcggctcaaagaagatacgtcttttgggggcaacctcgggcgagcagtcttccaggccaaaaagaggcttcttgaacctcttggtctggttgaggaagcggctaagacggctcctggaaagaagaggcctgtagatcagtctcctcaggaaccggactcatcatctggtgttggcaaatcgggcaaacagcctgccagaaaaagactaaatttcggtcagactggcgactcagagtcagtcccagaccctcaacctctcggagaaccaccagcagcccccacaagtttgggatctaatacaatggcttcaggcggtggcgcaccaatggcagacaataacgagggtgccgatggagtgggtaattcctcaggaaattggcattgcgattcccaatggctgggcgacagagtcatcaccaccagcaccagaacctgggccctgcccacttacaacaaccatctctacaagcaaatctccagccaatcaggagcttcaaacgacaaccactactttggctacagcaccccttgggggtattttgactttaacagattccactgccacttctcaccacgtgactggcagcgactcattaacaacaactggggattccggcccaagaaactcagcttcaagctcttcaacatccaagttaaagaggtcacgcagaacgatggcacgacgactattgccaataaccttaccagcacggttcaggtgtttacggactcggagtatcagctcccgtacgtgctcgggtcggcgcaccaaggctgtctcccgccgtttccagcggacgtcttcatggtccctcagtatggatacctcaccctgaacaacggaagtcaagcggtgggacgctcatccttttactgcctggagtacttcccttcgcagatgctaaggactggaaataacttccaattcagctataccttcgaggatgtaccttttcacagcagctacgctcacagccagagtttggatcgcttgatgaatcctcttattgatcagtatctgtactacctgaacagaacgcaaggaacaacctctggaacaaccaaccaatcacggctgctttttagccaggctgggcctcagtctatgtctttgcaggccagaaattggctacctgggccctgctaccggcaacagagactttcaaagactgctaacgacaacaacaacagtaactttccttggacagcggccagcaaatatcatctcaatggccgcgactcgctggtgaatccaggaccagctatggccagtcacaaggacgatgaagaaaaatttttccctatgcacggcaatctaatatttggcaaagaagggacaacggcaagtaacgcagaattagataatgtaatgattacggatgaagaagagattcgtaccaccaatcctgtggcaacagagcagtatggaactgtggcaaataacttgcagagctcaaatacagctcccacgactagaactgtcaatgatcagggggccttacctggcatggtgtggcaagatcgtgacgtgtaccttcaaggacctatctgggcaaagattcctcacacggatggacactttcatccttctcctctgatgggaggctttggactgaaacatccgcctcctcaaatcatgatcaaaaatactccggtaccggcaaatcctccgacgactttcagcccggccaagtttgcttcatttatcactcagtactccactggacaggtcagcgtggaaattgagtgggagctacagaaagaaaacagcaaacgttggaatccagagattcagtacacttccaactacaacaagtctgttaatgtggactttactgtagacactaatggtgtttatagtgaacctcgccccattggcacccgttaccttacccgtcccctgtaa

SEQ ID NO: 5259 - protein, 736 aa, Artificial Sequence; identical to SEQ ID NO: 5229
  Description of Artificial Sequence: Synthetic polypeptide

SEQ ID NO: 5260 - DNA, 2211 bp, Artificial Sequence; identical to SEQ ID NO: 5228
  Description of Artificial Sequence: Synthetic polynucleotide

SEQ ID NO: 5261 - protein, 736 aa, Artificial Sequence; identical to SEQ ID NO: 5229
  Description of Artificial Sequence: Synthetic polypeptide

SEQ ID NO: 5262 - DNA, 2211 bp, Artificial Sequence
  Description of Artificial Sequence: Synthetic polynucleotide
atggctgctgacggttatcttccagattggctcgaggacaacctttctgaaggcattcgtgagtggtgggctctgaaacctggagtccctcaacccaaagcgaaccaacaacaccaggacaaccgtcggggtcttgtgcttccgggttacaaatacctcggacccggtaacggactcgacaaaggagagcccgtcaacgcggcggatgcagcggccctcgagcacgacaaggcctacgaccagcagctcaaagcgggtgacaatccgtacctgcggtataaccacgccgacgccgagtttcaggagcgtctgcaagaagatacgtcttttgggggcaacctcgggcgagcagtcttccaggccaagaagagggttctcgaaccttttggtctggttgaggaaggtgctaagacggctcctggaaagaaacgtccggtagagcagtcgccacaagagccagactcctcctcgggcatcggcaagacaggccagcagcccgctaaaaagagactcaattttggtcagactggcgactcagagtcagtccccgacccacaacctctcggagaacctccagcaacccccgctgctgtgggacctactacaatggcttcaggcggtggcgcaccaatggcagacaataacgaaggcgccgacggagtgggtaatgcctcaggaaattggcattgcgattccacatggctgggcgacagagtcatcaccaccagcacccgcacctgggccttgcccacctacaataaccacctctacaagcaaatctccagtgcttcaacgggggccagcaacgacaaccactacttcggctacagcaccccctgggggtattttgatttcaacagattccactgccatttctcaccacgtgactggcagcgactcatcaacaacaattggggattccggcccaagagactcaacttcaagctcttcaacatccaagtcaaggaggtcacgacgaatgatggcgtcacgaccatcgctaataaccttaccagcacggttcaagtcttctcggactcggagtaccagcttccgtacgtcctcggctctgcgcaccagggctgcctccctccgttcccggcggacgtgttcatgattccgcaatacggctacctgacgctcaacaatggcagccaagccgtgggacgttcatccttttactgcctggaatatttcccttctcagatgctgagaacgggcaacaactttaccttcagctacacctttgaggaagtgcctttccacagcagctacgcgcacagccagagcctggaccggctgatgaatcctctcatcgaccaatacctgtattacctgaacagaactcaaaatcagtccggaagtgcccaaaacaaggacttgctgtttagccgtgggtctccagctggcatgtctgttcagcccaaaaactggctacctggaccctgttatcggcagcagcgcgtttctaaaacaaaaacagacaacaacaacagcaattttacctggactggtgcttcaaaatataacctcaatgggcgtgaatccatcatcaaccctggcactgctatggcctcacacaaagacgacgaagacaagttctttcccatgagcggtgtcatgatttttggaaaagagagcgccggagcttcaaacactgcattggacaatgtcatgattacagacgaagaggaaattaaagccactaaccctgtggccaccgaaagatttgggaccgtggcagtcaatttccagagcagcagcacagaccctgcgaccggagatgtgcatgttatgggagccttacctggaatggtgtggcaagacagagacgtatacctgcagggtcctatttgggccaaaattcctcacacggatggacactttcacccgtctcctctcatgggcggctttggacttaagcacccgcctcctcagatcctcatcaaaaacacgcctgttcctgcgaatcctccggcagagttttcggctacaaagtttgcttcattcatcacccagtattccacaggacaagtgagcgtggagattgaatgggagctgcagaaagaaaacagcaaacgctggaatcccgaagtgcagtatacatctaactatgcaaaatctgccaacgttgatttcactgtggacaacaatggactttatactgagcctcgccccattggcacccgttacctcacccgtcccctgtaa

SEQ ID NO: 5263 - protein, 736 aa, Artificial Sequence
  Description of Artificial Sequence: Synthetic polypeptide
MAADGYLPDWLEDNLSEGIREWWALKPGVPQPKANQQHQDNRRGLVLPGYKYLGPGNGLDKGEPVNAADAAALEHDKAYDQQLKAGDNPYLRYNHADAEFQERLQEDTSFGGNLGRAVFQAKKRVLEPFGLVEEGAKTAPGKKRPVEQSPQEPDSSSGIGKTGQQPAKKRLNFGQTGDSESVPDPQPLGEPPATPAAVGPTTMASGGGAPMADNNEGADGVGNASGNWHCDSTWLGDRVITTSTRTWALPTYNNHLYKQISSASTGASNDNHYFGYSTPWGYFDFNRFHCHFSPRDWQRLINNNWGFRPKRLNFKLFNIQVKEVTTNDGVTTIANNLTSTVQVFSDSEYQLPYVLGSAHQGCLPPFPADVFMIPQYGYLTLNNGSQAVGRSSFYCLEYFPSQMLRTGNNFTFSYTFEEVPFHSSYAHSQSLDRLMNPLIDQYLYYLNRTQNQSGSAQNKDLLFSRGSPAGMSVQPKNWLPGPCYRQQRVSKTKTDNNNSNFTWTGASKYNLNGRESIINPGTAMASHKDDEDKFFPMSGVMIFGKESAGASNTALDNVMITDEEEIKATNPVATERFGTVAVNFQSSSTDPATGDVHVMGALPGMVWQDRDVYLQGPIWAKIPHTDGHFHPSPLMGGFGLKHPPPQILIKNTPVPANPPAEFSATKFASFITQYSTGQVSVEIEWELQKENSKRWNPEVQYTSNYAKSANVDFTVDNNGLYTEPRPIGTRYLTRPL

SEQ ID NO: 5264 - DNA, 2217 bp, Artificial Sequence
  Description of Artificial Sequence: Synthetic polynucleotide
atggctgccgatggttatcttccagattggctcgaggacaacctctctgagggcattcgcgagtggtgggacttgaaacctggagccccgaaacccaaagccaaccagcaaaagcaggacgacggccggggtctggtgcttcctggctacaagtacctcggacccttcaacggactcgacaagggggagcccgtcaacgcggcggatgcaacggccctcgagcacgacaaggcctacgaccagcagctgcaggcgggtgacaatccgtacctgcggtataaccacgccgacgccgagtttcaggagcgtctgcaagaagatacgtcttttgggggcaacctcgggcgagcagtcttccaggccaagaagcgggttctcgaacctctcggtctggttgaggaaggcgctaagacggctcctggaaagaagagaccggtagagccatcaccccagcgttctccagactcctctacgggcatcggcaagaaaggccaacagcccgccagaaaaagactcaattttggtcagactggcgactcagagtcagttccagaccctcaacctctcggagaaccaccagcagcccccacaagtttgggatctaatacaatggcttcaggcggtggcgcaccaatggcagacaataacgagggtgccgatggagtgggtaattcctcaggaaattggcattgcgattcccaatggctgggcgacagagtcatcaccaccagcacccgcacctgggccttgcccacctacaataaccacctctacaagcaaatctccagtgcttcaacgggggccagcaacgacaaccactacttcggctacagcaccccctgggggtattttgactttaaccgcttccactgccacttctcgccaagagactggcaaagactcatcaacaacaattggggattccggcccaagagactcaacttcaaactcttcaacatccaagtcaaggaggtcacgacgaatgatggcgtcacgaccatcgccaataacctcaccagcaccatccaggtgtttacggactcggagtaccagctgccgtacgttctcggctctgcccaccagggctgcctgcctccgttcccggcggacgtgttcatgattccccagtatggatacctcaccctgaacaacggaagtcaagcggtgggacgctcatccttttactgcctggagtacttcccttcgcagatgctaaggactggaaataacttccaattcagctataccttcgaggatgtaccttttcacagcagctacgctcacagccagagtttggatcgcttgatgaatcctcttattgatcagtatctgtactacctgaacagaacgcaaggaacaacctctggaacaaccaaccaatcacggctgctttttagccaggctgggcctcagtctatgtctttgcaggccagaaattggctacctgggccctgctaccggcaacagagactttcaaagactgctaacgacaacaacaacagtaactttccttggacagcagccagcaaatatcatctcaatggccgcgactcgctggtgaatccaggaccagctatggccagtcacaaggacgatgaagaaaaatttttccctatgcacggcaatctaatatttggcaaagaagggacaacggcaagtaacgcagaattagataatgtaatgattacggatgaagaagagattcgtaccaccaatcctgtggcaacagagcagtatggaactgtggcaaataacttgcagagctcaaatacagctcccacgactagaactgtcaatgatcagggggccttacctggcatggtgtggcaagatcgtgacgtgtaccttcaggggcccatctgggcaaagattccacacacggacggacattttcacccctctcccctcatgggtggattcggacttaaacaccctcctccgcagattctcatcaagaacaccccggtacctgcgaatccttcgaccaccttcagtgcggcaaagtttgcttccttcatcacacagtactccacgggacaggtcagcgtggagatcgagtgggagctgcagaaggaaaacagcaagcgctggaacccggagatccagtacacttccaactattacaagtctaataatgttgaatttgctgttaatactgaaggtgtatatagtgaaccccgccccattggcaccagatacctgactcgtaatctgtaa

SEQ ID NO: 5265 - protein, 738 aa, Artificial Sequence
  Description of Artificial Sequence: Synthetic polypeptide
MAADGYLPDWLEDNLSEGIREWWDLKPGAPKPKANQQKQDDGRGLVLPGYKYLGPFNGLDKGEPVNAADATALEHDKAYDQQLQAGDNPYLRYNHADAEFQERLQEDTSFGGNLGRAVFQAKKRVLEPLGLVEEGAKTAPGKKRPVEPSPQRSPDSSTGIGKKGQQPARKRLNFGQTGDSESVPDPQPLGEPPAAPTSLGSNTMASGGGAPMADNNEGADGVGNSSGNWHCDSQWLGDRVITTSTRTWALPTYNNHLYKQISSASTGASNDNHYFGYSTPWGYFDFNRFHCHFSPRDWQRLINNNWGFRPKRLNFKLFNIQVKEVTTNDGVTTIANNLTSTIQVFTDSEYQLPYVLGSAHQGCLPPFPADVFMIPQYGYLTLNNGSQAVGRSSFYCLEYFPSQMLRTGNNFQFSYTFEDVPFHSSYAHSQSLDRLMNPLIDQYLYYLNRTQGTTSGTTNQSRLLFSQAGPQSMSLQARNWLPGPCYRQQRLSKTANDNNNSNFPWTAASKYHLNGRDSLVNPGPAMASHKDDEEKFFPMHGNLIFGKEGTTASNAELDNVMITDEEEIRTTNPVATEQYGTVANNLQSSNTAPTTRTVNDQGALPGMVWQDRDVYLQGPIWAKIPHTDGHFHPSPLMGGFGLKHPPPQILIKNTPVPANPSTTFSAAKFASFITQYSTGQVSVEIEWELQKENSKRWNPEIQYTSNYYKSNNVEFAVNTEGVYSEPRPIGTRYLTRNL

SEQ ID NO: 5266 - DNA, 2208 bp, Artificial Sequence
  Description of Artificial Sequence: Synthetic polynucleotide
atggctgccgatggttatcttccagattggctcgaggacaaccttagtgaaggaattcgcgagtggtgggacttgaaacctggagccccgaagcccaaagccaaccagcaaaagcaggacgacggccggggtctggtgcttcctggctacaagtacctcggacccttcaacggactcgacaagggggagcccgtcaacgcggcggacgcagcggccctcgagcacgacaaggcctacgaccagcagctcaaagcgggtgacaatccgtacctgcggtataaccacgccgacgccgagtttcaggagcgtctgcaagaagatacgtcttttgggggcaacctcgggcgagcagtcttccaggccaagaagcgggttctcgaacctctcggtctggttgaggaaggtgctaagacggctcctggaaagaaacgtccggtagagcagtcgccacaagagccagactcctcctcgggcattggcaagacaggccagcagcccgctaaaaagagactcaattttggtcagactggcgactcagagtcagtccccgacccacaacctctcggagaacctccagcaacccccgctgctgtgggacctactacaatggcttcaggcggtggcgcaccaatggcagacaataacgaaggcgccgacggagtgggtaatgcctcaggaaattggcattgcgattccacatggctgggcgacagagtcatcaccaccagcacccgaacctgggccctgcccacctacaacaaccacctctacaaacaaatttccagccaatcaggagcctcgaacgacaatcactactttggctacagcaccccttgggggtattttgatttcaacagattccactgccacttttcaccacgtgactggcagcgactcatcaacaacaattggggattccggcccaagagactcagcttcaagctcttcaacatccaggtcaaggaggtcacgcagaatgaaggcaccaagaccatcgccaataaccttaccagcacggttcaagtgtttacggactcggagtatcagctcccgtacgtgctcggctcggcgcatcaaggatgcctcccgccgttcccagcagacgtcttcatggtgccacagtatggatacctcaccctgaacaacgggagtcaggcagtaggacgctcttcattttactgcctggagtactttccttctcagatgctgcgtaccggaaacaactttaccttcagctacacttttgaggacgttcctttccacagcagctacgctcacagccagagtctggaccgtctcatgaatcctctgattgaccagtacctgtattacttgagcagaacaaacactccaagtggaaccaccacgcagtcaaggcttcagttttctcaggccggagcgagtgacattcgggaccagtctaggaactggcttcctggaccctgttaccgccagcagcgagtatcaaagacatctgcggataacaacaacagtgaatactcgtggactggagctaccaagtaccacctcaatggcagagactctctggtgaatccgggcccggccatggcaagccacaaggactatgaagaaaagttttttcctcagagcggggttctcatctttgggaagcaaggctcagagaaaacaaatgtggacattgaaaaggtcatgattacagacgaagaggaaatcaggacaaccaatcccgtggctacggagcagtatggttctgtatctaccaacctccagagaggcaacagacaagcagctaccgcagatgtcaacacacaaggcgttcttccaggcatggtctggcaggacagagatgtgtaccttcaggggcccatctgggcaaagattccacacacggacggacattttcacccgtctccgctgatgggcggctttggcctgaaacatcctccgcctcagatcctgatcaagaacacgcctgtacctgcggatcctccgaccaccttcaaccagtcaaagctgaactctttcatcactcagtattctactggccaagtcagcgtggagatcgagtgggagctgcagaaggaaaacagcaagcgctggaaccccgagatccagtacacctccaactactacaaatctacaagtgtggactttgctgttaatacagaaggcgtgtactctgaaccccgccccattggcacccgttacctcacccgtaatctgtaa

SEQ ID NO: 5267 - protein, 735 aa, Artificial Sequence
  Description of Artificial Sequence: Synthetic polypeptide
MAADGYLPDWLEDNLSEGIREWWDLKPGAPKPKANQQKQDDGRGLVLPGYKYLGPFNGLDKGEPVNAADAAALEHDKAYDQQLKAGDNPYLRYNHADAEFQERLQEDTSFGGNLGRAVFQAKKRVLEPLGLVEEGAKTAPGKKRPVEQSPQEPDSSSGIGKTGQQPAKKRLNFGQTGDSESVPDPQPLGEPPATPAAVGPTTMASGGGAPMADNNEGADGVGNASGNWHCDSTWLGDRVITTSTRTWALPTYNNHLYKQISSQSGASNDNHYFGYSTPWGYFDFNRFHCHFSPRDWQRLINNNWGFRPKRLSFKLFNIQVKEVTQNEGTKTIANNLTSTVQVFTDSEYQLPYVLGSAHQGCLPPFPADVFMVPQYGYLTLNNGSQAVGRSSFYCLEYFPSQMLRTGNNFTFSYTFEDVPFHSSYAHSQSLDRLMNPLIDQYLYYLSRTNTPSGTTTQSRLQFSQAGASDIRDQSRNWLPGPCYRQQRVSKTSADNNNSEYSWTGATKYHLNGRDSLVNPGPAMASHKDYEEKFFPQSGVLIFGKQGSEKTNVDIEKVMITDEEEIRTTNPVATEQYGSVSTNLQRGNRQAATADVNTQGVLPGMVWQDRDVYLQGPIWAKIPHTDGHFHPSPLMGGFGLKHPPPQILIKNTPVPADPPTTFNQSKLNSFITQYSTGQVSVEIEWELQKENSKRWNPEIQYTSNYYKSTSVDFAVNTEGVYSEPRPIGTRYLTRNL

SEQ ID NO: 5268 - DNA, 2214 bp, Artificial Sequence
  Description of Artificial Sequence: Synthetic polynucleotide
atggctgccgatggttatcttccagattggctcgaggacaacctctctgagggcattcgcgagtggtgggacttgaaacctggagccccgaaacccaaagccaaccagcaaaagcaggacgacggccggggtctggtgcttcctggctacaagtacctcggacccttcaacggactcgacaagggggagcccgtcaacgcggcggatgcagcggccctcgagcacgacaaggcctacgaccagcagctcaaagcgggtgacaatccgtacctgcggtataaccacgccgacgccgagtttcaggagcgtctgcaagaagatacgtcttttgggggcaacctcgggcgagcagtcttccaggccaagaagagggttctcgaaccttttggtctggttgaggaaggtgctaagacggctcctggaaagaaacgtccggtagagcagtcgccacaagagccagactcctcctcgggcattggcaagacaggccagcagcctgcaagaaaaagattgaattttggtcagactggagacgcagactcagtacctgacccccagcctctcggacagccaccagcagccccctctggtctgggaactaatacgatggctacaggcagtggcgcaccaatggcagacaataacgagggcgccgacggagtgggtaattcctcgggaaattggcattgcgattcccaatggctgggggacagagtcatcaccaccagcacccgaacctgggccctgcccacctacaacaatcacctctacaagcaaatctccaacagcacatctggaggatcttcaaatgacaacgcctacttcggctacagcaccccctgggggtattttgatttcaacagattccactgccatttctcaccacgtgactggcagcgactcatcaacaacaattggggattccggcccaagagactcaacttcaagctcttcaacatccaggtcaaggaggtcacgcagaatgaaggcaccaagaccatcgccaataacctcaccagcaccatccaggtgtttacggactcggagtaccagctgccgtacgttctcggctctgcccaccagggctgcctgcctccgttcccggcggacgtgttcatgattccccagtacggctacctaacactcaacaacggtagtcaggccgtgggacgctcctccttctactgcctggaatactttccttcgcagatgctgagaaccggcaacaacttccagtttacttacaccttcgaggacgtgcctttccacagcagctacgcccacagccagagcttggaccggctgatgaatcctctgattgaccagtacctgtactacttgtctcggactcaaacaacaggaggcacgacaaatacgcagactctgggcttcagccaaggtgggcctaatacaatggccaatcaggcaaagaactggctgccaggaccctgttaccgccagcagcgagtatcaaagacatttgcggataacaacaacagtgaatactcgtggactggagctaccaagtaccacctcaatggcagagactctctggtgaatccgggcccggccatggcaagccacaaggacgatgaagaaaagttttttcctcagagcggggttctcatctttgggaagcaaggctcagagaaaacaaatgtggacattgaaaaggtcatgattacagacgaagaggaaatcaggacaaccaatcccgtggctacggagcagtatggttctgtatctaccaacctccagagaggcaacagacaagcagctaccgcagatgtcaacacacaaggcgttcttccaggcatggtctggcaggacagagatgtgtaccttcaggggcccatctgggcaaagattccacacacggacggacattttcacccctctcccctcatgggtggattcggacttaaacaccctccgcctcagatcctgatcaagaacacgcctgtacccgcggatcctccgaccaccttcaaccagtcaaagctgaactctttcatcacccagtattctactggccaagtcagcgtggagatcgagtgggagctgcagaaggaaaacagcaagcgctggaaccccgagatccagtacacctccaactactacaaatctacaagtgtggactttgctgttaatacagaaggcgtgtactctgaaccccgccccattggcacccgttacctcacccgtaatctgtaa

SEQ ID NO: 5269 - protein, 737 aa, Artificial Sequence
  Description of Artificial Sequence: Synthetic polypeptide
MAADGYLPDWLEDNLSEGIREWWDLKPGAPKPKANQQKQDDGRGLVLPGYKYLGPFNGLDKGEPVNAADAAALEHDKAYDQQLKAGDNPYLRYNHADAEFQERLQEDTSFGGNLGRAVFQAKKRVLEPFGLVEEGAKTAPGKKRPVEQSPQEPDSSSGIGKTGQQPARKRLNFGQTGDADSVPDPQPLGQPPAAPSGLGTNTMATGSGAPMADNNEGADGVGNSSGNWHCDSQWLGDRVITTSTRTWALPTYNNHLYKQISNSTSGGSSNDNAYFGYSTPWGYFDFNRFHCHFSPRDWQRLINNNWGFRPKRLNFKLFNIQVKEVTQNEGTKTIANNLTSTIQVFTDSEYQLPYVLGSAHQGCLPPFPADVFMIPQYGYLTLNNGSQAVGRSSFYCLEYFPSQMLRTGNNFQFTYTFEDVPFHSSYAHSQSLDRLMNPLIDQYLYYLSRTQTTGGTTNTQTLGFSQGGPNTMANQAKNWLPGPCYRQQRVSKTFADNNNSEYSWTGATKYHLNGRDSLVNPGPAMASHKDDEEKFFPQSGVLIFGKQGSEKTNVDIEKVMITDEEEIRTTNPVATEQYGSVSTNLQRGNRQAATADVNTQGVLPGMVWQDRDVYLQGPIWAKIPHTDGHFHPSPLMGGFGLKHPPPQILIKNTPVPADPPTTFNQSKLNSFITQYSTGQVSVEIEWELQKENSKRWNPEIQYTSNYYKSTSVDFAVNTEGVYSEPRPIGTRYLTRNL

SEQ ID NO: 5270 - DNA, 2217 bp, Artificial Sequence
  Description of Artificial Sequence: Synthetic polynucleotide
atggctgccgatggttatcttccagattggctcgaggacactctctctgaaggaataagacagtggtgggcgctgaaacctggagccccgaagcccaaagccaaccagcaaaagcaggacgacggccggggtctggtgcttcctggctacaagtacctcggacccttcaacggactcgacaagggggagcccgtcaacgcggcggatgcagcggccctcgagcacgacaaggcctacgaccagcagctcaaagcgggtgacaatccgtacctgcggtataaccacgccgacgccgagtttcaggagcgtctgcaagaagatacgtcttttgggggcaacctcgggcgagcagtcttccaggccaagaagcgggttctcgaacctctcggtctggttgaggaaggcgctaagacggctcctggaaagaagagaccggtagagccatcaccccagcgttctccagactcctctacgggcatcggcaagaaaggccaacagcccgccagaaaaagactcaattttggtcagactggcgactcagagtcagttccagaccctcaacctctcggagaaccaccagcagcccccacaagtttgggatctaatacaatggcttcaggcggtggcgcaccaatggcagacaataacgagggtgccgatggagtgggtaattcctcaggaaattggcattgcgattcccaatggctgggcgacagagtcatcaccaccagcacccgcacctgggccttgcccacctacaataaccacctctacaagcaaatctccagtgcttcaacgggggccagcaacgacaaccactacttcggctacagcaccccctgggggtattttgactttaaccgcttccactgccacttctcgccaagagactggcaaagactcatcaacaacaattggggattccggcccaagagactcaacttcaaactcttcaacatccaagtcaaggaggtcacgacgaatgatggcgtcacgaccatcgccaataacctcaccagcaccatccaggtgtttacggactcggagtaccagctgccgtacgttctcggctctgcccaccagggctgcctgcctccgttcccggcggacgtgttcatgattccccagtatggatacctcaccctgaacaacggaagtcaagcggtgggacgctcatccttttactgcctggagtacttcccttcgcagatgctaaggactggaaataacttccaattcagctataccttcgaggatgtaccttttcacagcagctacgctcacagccagagtttggatcgcttgatgaatcctcttattgatcagtatctgtactacctgaacagaacgcaaggaacaacctctggaacaaccaaccaatcacggctgctttttagccaggctgggcctcagtctatgtctttgcaggccagaaattggctacctgggccctgctaccggcaacagagactttcaaagactgctaacgacaacaacaacagtaactttccttggacagcagccagcaaatatcatctcaatggccgcgactcgctggtgaatccaggaccagctatggccagtcacaaggacgatgaagaaaaatttttccctatgcacggcaatctaatatttggcaaagaagggacaacggcaagtaacgcagaattagataatgtaatgattacggatgaagaagagattcgtaccaccaatcctgtggcaacagagcagtatggaactgtggcaaataacttgcagagctcaaatacagctcccacgactagaactgtcaatgatcagggggccttacctggcatggtgtggcaagatcgtgacgtgtaccttcaggggcccatctgggcaaagattccacacacggacggacattttcacccctctcccctcatgggtggattcggacttaaacaccctcctccgcagattctcatcaagaacaccccggtacctgcgaatccttcgaccaccttcagtgcggcaaagtttgcttccttcatcacacagtactccacgggacaggtcagcgtggagatcgagtgggagctgcagaaggaaaacagcaagcgctggaacccggagatccagtacacttccaactattacaagtctaataatgttgaatttgctgttaatactgaaggtgtatatagtgaaccccgccccattggcaccagatacctgactcgtaatctgtaa

SEQ ID NO: 5271 - protein, 738 aa, Artificial Sequence
  Description of Artificial Sequence: Synthetic polypeptide
MAADGYLPDWLEDTLSEGIRQWWALKPGAPKPKANQQKQDDGRGLVLPGYKYLGPFNGLDKGEPVNAADAAALEHDKAYDQQLKAGDNPYLRYNHADAEFQERLQEDTSFGGNLGRAVFQAKKRVLEPLGLVEEGAKTAPGKKRPVEPSPQRSPDSSTGIGKKGQQPARKRLNFGQTGDSESVPDPQPLGEPPAAPTSLGSNTMASGGGAPMADNNEGADGVGNSSGNWHCDSQWLGDRVITTSTRTWALPTYNNHLYKQISSASTGASNDNHYFGYSTPWGYFDFNRFHCHFSPRDWQRLINNNWGFRPKRLNFKLFNIQVKEVTTNDGVTTIANNLTSTIQVFTDSEYQLPYVLGSAHQGCLPPFPADVFMIPQYGYLTLNNGSQAVGRSSFYCLEYFPSQMLRTGNNFQFSYTFEDVPFHSSYAHSQSLDRLMNPLIDQYLYYLNRTQGTTSGTTNQSRLLFSQAGPQSMSLQARNWLPGPCYRQQRLSKTANDNNNSNFPWTAASKYHLNGRDSLVNPGPAMASHKDDEEKFFPMHGNLIFGKEGTTASNAELDNVMITDEEEIRTTNPVATEQYGTVANNLQSSNTAPTTRTVNDQGALPGMVWQDRDVYLQGPIWAKIPHTDGHFHPSPLMGGFGLKHPPPQILIKNTPVPANPSTTFSAAKFASFITQYSTGQVSVEIEWELQKENSKRWNPEIQYTSNYYKSNNVEFAVNTEGVYSEPRPIGTRYLTRNL

SEQ ID NO: 5272 - DNA, 2208 bp, Artificial Sequence; identical to SEQ ID NO: 5102
  Description of Artificial Sequence: Synthetic polynucleotide

SEQ ID NO: 5273 - protein, 735 aa, Artificial Sequence [sequence omitted]

SEQ ID NO: 5274 - DNA, 2208 bp, Artificial Sequence
  Description of Artificial Sequence: Synthetic polynucleotide
atggctgccgatggttatcttccagattggctcgaggacaacctctctgagggcattcgcgagtggtgggcgctgaaacctggagccccgaagcccaaagccaaccagcaaaagcaggacgacggccggggtctggtgcttcctggctacaagtacctcggacccttcaacggactcgacaagggggagcccgtcaacgcggcggacgccgcggccctcgagcacgacaaggcctacgaccagcagctgcaggcgggtgacaatccgtacctgcggtataaccacgccgacgccgagtttcaggagcgtctgcaagaagatacgtcttttgggggcaacctcgggcgagcagtcttccaggccaaaaagaggcttcttgaacctcttggtctggttgaggaagcagctaaaacggctcctggaaagaagaggcctgtagagcagtctcctcaggaaccggactcctccgcgggtattggcaaatcgggtgcacagcccgccaaaaagagactcaatttcggtcagactggcgactcagagtcagtcccagaccctcaacctctcggagaaccaccagcagcccccacaagtttgggatctaatacaatggcttcaggcggtggcgcaccaatggcagacaataacgaaggcgccgacggagtgggtaatgcctcaggaaattggcattgcgattccacatggctgggcgacagagtcatcaccaccagcacccgcacctgggccttgcccacctacagcaaccatctctacaagcaaatctccagccaatcaggagcttcaaacgacaacgactactttggctacagcaccccttgggggtattttgatttcaacagattccactgccacttttcaccacgtgactggcaaagactcatcaacaacaactggggattccgacccaagagactcaacttcaagctctttaacattcaagtcaaagaggtcacgcagaatgacggtacgacgacgattgccaataaccttaccagcacggttcaggtgtttactgactcggagtaccagctcccgtacgtcctcggctcggcgcatcaaggatgcctcccgccgttcccagcagacgtcttcatggtgccacagtatggatacctcaccctgaacaacgggagtcaggcagtaggacgctcttcattttactgcctggagtactttccttctcagatgctgcgtaccggaaacaactttaccttcagctacacttttgaggacgttcctttccacagcagctacgctcacagccagagtctggaccgtctcatgaatcctctcatcgaccagtacctgtattacttgagcagaacaaacactccaagtggaaccaccacgcagtcaaggcttcagttttctcaggccggagcgagtgacattcgggaccagtctaggaactggcttcctggaccctgttaccgccagcagcgagtatcaaagacatctgaggataacaacaacagtgaatactcgtggactggagctaccaagtaccacctcaatggcagagactctctggtgaatccgggcccggccatggcaagccacaaggacgatgaagaaaagttttttcctcagagcggggttctcatctttgggaagcaaggctcagagaaaacaaatgtggacattgaaaaggtcatgattacagacgaagaggaaatcaggacaaccaatcccgtggctacggagcagtatggttctgtatctaccaacctccagagaggcaacagacaagcagctaccgcagatgtcaacacacaaggcgttcttccaggcatggtctggcaggacagagatgtgtaccttcaggggcccatctgggcaaagattccacacacggacggacattttcacccctctcccctcatgggtggattcggacttaaacaccctcctccacagattctcatcaagaacaccccggtacctgcgaatccttcgaccaccttcagtgcggcaaagtttgcttccttcatcacacagtactccacgggacaggtcagcgtggagatcgagtgggagctgcagaaggaaaacagcaaacgctggaatcccgaaattcagtacacttccaactacaacaagtctgttaatgtggactttactgtggacactaatggcgtgtattcagagcctcgccccattggcaccagatacctgactcgtaatctgtaa

SEQ ID NO: 5275 - protein, 735 aa, Artificial Sequence
  Description of Artificial Sequence: Synthetic polypeptide
MAADGYLPDWLEDNLSEGIREWWALKPGAPKPKANQQKQDDGRGLVLPGYKYLGPFNGLDKGEPVNAADAAALEHDKAYDQQLQAGDNPYLRYNHADAEFQERLQEDTSFGGNLGRAVFQAKKRLLEPLGLVEEAAKTAPGKKRPVEQSPQEPDSSAGIGKSGAQPAKKRLNFGQTGDSESVPDPQPLGEPPAAPTSLGSNTMASGGGAPMADNNEGADGVGNASGNWHCDSTWLGDRVITTSTRTWALPTYSNHLYKQISSQSGASNDNDYFGYSTPWGYFDFNRFHCHFSPRDWQRLINNNWGFRPKRLNFKLFNIQVKEVTQNDGTTTIANNLTSTVQVFTDSEYQLPYVLGSAHQGCLPPFPADVFMVPQYGYLTLNNGSQAVGRSSFYCLEYFPSQMLRTGNNFTFSYTFEDVPFHSSYAHSQSLDRLMNPLIDQYLYYLSRTNTPSGTTTQSRLQFSQAGASDIRDQSRNWLPGPCYRQQRVSKTSEDNNNSEYSWTGATKYHLNGRDSLVNPGPAMASHKDDEEKFFPQSGVLIFGKQGSEKTNVDIEKVMITDEEEIRTTNPVATEQYGSVSTNLQRGNRQAATADVNTQGVLPGMVWQDRDVYLQGPIWAKIPHTDGHFHPSPLMGGFGLKHPPPQILIKNTPVPANPSTTFSAAKFASFITQYSTGQVSVEIEWELQKENSKRWNPEIQYTSNYNKSVNVDFTVDTNGVYSEPRPIGTRYLTRNL

SEQ ID NO: 5276 - DNA, 2208 bp, Artificial Sequence
  Description of Artificial Sequence: Synthetic polynucleotide
atggctgccgatggttatcttccagattggctcgaggacaacctctctgagggcattcgcgagtggtgggcgctgaaacctggagccccgaagcccaaagccaaccagcaaaagcaggacgacggccggggtctggtgcttcctggctacaagtacctcggacccttcaacggactcgacaagggggagcccgtcaacgcggcggacgcagcggccctcgagcacgacaaggcctacgaccagcagctgcaggcgggtgacaatccgtacctgcggtataaccacgccgacgccgagttccaggagcgtctgcaagaagatacgtcttttgggggcaacctcgggcgagcagtcttccaggccaagaagagggttctcgaaccttttggtctggttgaggaaggtgctaagacggctcctggaaagaaacgtccggtagagcagtcgccacaagagccagactcctcctcgggcattggcaagacaggccagcagcccgctaaaaagagactcaattttggtcagactggcgactcagagtcagtcccagaccctcaacctctcggagaaccaccagcagcccccacaagtttgggatctaatacaatggcttcaggcggtggcgcaccaatggcagacaataacgagggcgccgacggagtgggtaattcctcgggaaattggcattgcgattccacatggatgggcgacagagtcatcaccaccagcacccgaacctgggccctgcccacctacaacaaccacctctacaaacaaatttccagccaatcaggagcttcaaacgacaaccactactttggctacagcaccccttgggggtattttgactttaacagattccactgccacttttcaccacgtgactggcagcgactcattaacaacaactggggattccggcccaagaaactcaacttcaagctctttaacatccaggtcaaggaggtcacgcagaatgaaggcaccaagaccatcgccaataacctcaccagcaccatccaggtgtttacggactcggagtaccagctgccgtacgttctcggctctgcccaccagggctgcctgcctccgttcccggcggacgtgttcatgattccccagtacggctacctaacactcaacaacggtagtcaggccgtgggacgctcctccttctactgcctggaatactttccttcgcagatgctgagaaccggcaacaacttccagtttacttacaccttcgaggacgtgcctttccacagcagctacgcccacagccagagcttggaccggctgatgaatcctctgattgaccagtacctgtattacttgtctcggactcaaacaacaggaggcacgacaaatacgcagactctgggcttcagccaaggtgggcctaatacaatggccaatcaggcaaagaactggctgcctggaccctgttaccgccagcagcgagtatcaaagacatctgcggataacaacaacagtgaatactcgtggactggagctaccaagtaccacctcaatggcagagactctctggtgaatccgggcccggccatggcaagccacaaggacgatgaagaaaagttttttcctcagagcggggttctcatctttgggaagcaaggctcagagaaaacaaatgtggacattgaaaaggttatgattacagacgaagaggaaatcaggacaaccaatcccgtggctacggagcagtatggttctgtatctaccaacctccagagaggcaacagacaagcagctaccgcagatgtcaacacacagggcgttcttccaggcatggtctggcaggacagagatgtgtaccttcagggtcccatttgggccaaaattcctcacacagatggacactttcacccgtcccctcttatgggcggctttggactcaagaacccgcctcctcagatcctcatcaaaaacacgcctgttcctgcgaatcctccggcagagttttcagctacaaagtttgcttcattcatcacccaatactccacaggacaagtgagtgtggaaattgaatgggagctgcagaaagaaaacagcaagcgctggaatcccgaagtgcagtacacatccaattatgcaaaatctgccaacgttgattttactgtggacactaatggcgtgtattcagagcctcgccccattggcaccagatacctcacccgtaatctgtaa

SEQ ID NO: 5277 - protein, 735 aa, Artificial Sequence
  Description of Artificial Sequence: Synthetic polypeptide
MAADGYLPDWLEDNLSEGIREWWALKPGAPKPKANQQKQDDGRGLVLPGYKYLGPFNGLDKGEPVNAADAAALEHDKAYDQQLQAGDNPYLRYNHADAEFQERLQEDTSFGGNLGRAVFQAKKRVLEPFGLVEEGAKTAPGKKRPVEQSPQEPDSSSGIGKTGQQPAKKRLNFGQTGDSESVPDPQPLGEPPAAPTSLGSNTMASGGGAPMADNNEGADGVGNSSGNWHCDSTWMGDRVITTSTRTWALPTYNNHLYKQISSQSGASNDNHYFGYSTPWGYFDFNRFHCHFSPRDWQRLINNNWGFRPKKLNFKLFNIQVKEVTQNEGTKTIANNLTSTIQVFTDSEYQLPYVLGSAHQGCLPPFPADVFMIPQYGYLTLNNGSQAVGRSSFYCLEYFPSQMLRTGNNFQFTYTFEDVPFHSSYAHSQSLDRLMNPLIDQYLYYLSRTQTTGGTTNTQTLGFSQGGPNTMANQAKNWLPGPCYRQQRVSKTSADNNNSEYSWTGATKYHLNGRDSLVNPGPAMASHKDDEEKFFPQSGVLIFGKQGSEKTNVDIEKVMITDEEEIRTTNPVATEQYGSVSTNLQRGNRQAATADVNTQGVLPGMVWQDRDVYLQGPIWAKIPHTDGHFHPSPLMGGFGLKNPPPQILIKNTPVPANPPAEFSATKFASFITQYSTGQVSVEIEWELQKENSKRWNPEVQYTSNYAKSANVDFTVDTNGVYSEPRPIGTRYLTRNL

SEQ ID NO: 5278 - DNA, 2214 bp, Artificial Sequence; identical to SEQ ID NO: 5268
  Description of Artificial Sequence: Synthetic polynucleotide

SEQ ID NO: 5279 - protein, 737 aa, Artificial Sequence; identical to SEQ ID NO: 5269
  Description of Artificial Sequence: Synthetic polypeptide

SEQ ID NO: 5280 - protein, 736 aa, Artificial Sequence; identical to SEQ ID NO: 5093
  Description of Artificial Sequence: Synthetic polypeptide

SEQ ID NO: 5281 - protein, 736 aa, Artificial Sequence
  Description of Artificial Sequence: Synthetic polypeptide
MAADGYLPDWLEDNLSEGIREWWDLKPGAPKPKANQQKQDDGRGLVLPGYKYLGPFNGLDKGEPVNAADAAALEHDKAYDQQLKAGDNPYLRYNHADAEFQERLQEDTSFGGNLGRAVFQAKKRVLEPLGLVEEGAKTAPGKKRPVEQSPQEPDSSSGIGKTGQQPAKKRLNFGQTGDSESVPDPQPLGEPPAAPSGLGPNTMASGGGAPMADNNEGADGVGNSSGNWHCDSTWLGDRVITTSTRTWALPTYNNHLYKQISNGTSGGSTNDNTYFGYSTPWGYFDFNRFHCHFSPRDWQRLINNNWGFRPKRLNFKLFNIQVKEVTTNEGTKTIANNLTSTVQVFTDSEYQLPYVLGSAHQGCLPPFPADVFMVPQYGYLTLNNGSQALGRSSFYCLEYFPSQMLRTGNNFQFSYTFEDVPFHSSYAHSQSLDRLMNPLIDQYLYYLVRTQTTGTGGTQTLAFSQAGPSSMANQARNWVPGPCYRQQRVSTTTNQNNNSNFAWTGAAKFKLNGRDSLMNPGVAMASHKDDEDRFFPSSGVLIFGKQGAGNDGVDYSQVLITDEEEIKATNPVATEEYGAVAINNQRANTQAQTGLVHNQGVIPGMVWQNRDVYLQGPIWAKIPHTDGNFHPSPLMGGFGLKHPPPQILIKNTPVPADPPLTFNQAKLNSFITQYSTGQVSVEIEWELQKENSKRWNPEIQYTSNYYKSTNVDFAVNTEGVYSEPRPIGTRYLTRNL

SEQ ID NO: 5282 - protein, 736 aa, Artificial Sequence
  Description of Artificial Sequence: Synthetic polypeptide
MAADGYLPDWLEDNLSEGIREWWDLKPGAPKPKANQQKQDDGRGLVLPGYKYLGPFNGLDKGEPVNAADAAALEHDKAYDQQLKAGDNPYLRYNHADAEFQERLQEDTSFGGNLGRAVFQAKKRVLEPLGLVEEGAKTAPGKKRPVEQSPQEPDSSSGIGKTGQQPAKKRLNFGQTGDSESVPDPQPLGEPPAAPSGLGPNTMASGGGAPMADNNEGADGVGNSSGNWHCDSTWLGDRVITTSTRTWALPTYNNHLYKQISNGTSGGSTNDNTYFGYSTPWGYFDFNRFHCHFSPRDWQRLINNNWGFRPKRLNFKLFNIQVKEVTTNEGTKTIANNLTSTVQVFTDSEYQLPYVLGSAHQGCLPPFPADVFMVPQYGYLTLNNGSQALGRSSFYCLEYFPSQMLRTGNNFQFSYTFEDVPFHSSYAHSQSLDRLMNPLIDQYLYYLVRTQTTGTGGTQTLAFSQAGPSSMANQARNWVPGPCYRQQRVSTTTNQNNNSNFAWTGAAKFKLNGRDSLMNPGVAMASHKDDEDAFFPSSGVLIFGKQGAGNDGVDYSQVLITDEEEIKATNPVATEEYGAVAINNQAANTQAQTGLVHNQGVIPGMVWQNRDVYLQGPIWAKIPHTDGNFHPSPLMGGFGLKHPPPQILIKNTPVPADPPLTFNQAKLNSFITQYSTGQVSVEIEWELQKENSKRWNPEIQYTSNYYKSTNVDFAVNTEGVYSEPRPIGTRYLTRNL

SEQ ID NO: 5283 - protein, 538 aa, Artificial Sequence
  Description of Artificial Sequence: Synthetic polypeptide
MRAAAGGNGGDAGQGAEGVGNASGDWHCDSTWSESHVTTTSTRTWVLPTYNNHLYLRLGSSNASDTFNGFSTPWGYFDFNRFHCHFSPRDWQRLINNHWGLRPKSMQVRIFNIQVKEVTTSNGETTVSNNLTSTVQIFADSTYELPYVMDAGQEGSLPPFPNDVFMVPQYGYCGLVTGGSSQNQTDRNAFYCLEYFPSQMLRTGNNFEMVYKFENVPFHSMYAHSQSLDRLMNPLLDQYLWELQSTTSGGTLNQGNSATNFAKLTKTNFSGYRKNWLPGPMMKQQRFSKTASQNYKIPQGRNNSLLHYETRTTLDGRWSNFAPGTAMATAANDATDFSQAQLIFAGPNITGNTTTDANNLMFTSEDELRATNPRDTDLFGHLATNQQNATTVPTVDDVDGVGVYPGMVWQDRDIYYQGPIWAKIPHTDGHFHPSPLIGGFGLKSPPPQIFIKNTPVPANPATTFSPARINSFITQYSTGQVAVKIEWEIQKERSKRWNPEVQFTSNYGAQDSLLWAPDNAGAYKEPRAIGSRYLTNHL

SEQ ID NO: 5284 - protein, 736 aa, Artificial Sequence
  Description of Artificial Sequence: Synthetic polypeptide
MSFVDHPPDWLESIGDGFREFLGLEAGPPKPKANQQKQDNARGLVLPGYKYLGPGNGLDKGDPVNFADEVAREHDLSYQKQLEAGDNPYLKYNHADAEFQEKLASDTSFGGNLGKAVFQAKKRILEPLGLVETPDKTAPAAKKRPLEQSPQEPDSSSGVGKKGKQPARKRLNFDDEPGAGDGPPPEGPSSGAMSTETEMRAAAGGNGGDAGQGAEGVGNASGDWHCDSTWSESHVTTTSTRTWVLPTYNNHLYLRLGSSNASDTFNGFSTPWGYFDFNRFHCHFSPRDWQRLINNHWGLRPKSMQVRIFNIQVKEVTTSNGETTVSNNLTSTVHIFADSTYELPYVMDAGQEGSLPPFPNDVFMVPQYGYCGLVTGGSSQNQTDRNAFYCLEYFPSQMLRTGNNFEMVYKFENVPFHSMYAHSQSLDRLMNPLLDQYLWELQSTTSGGTLNQGNSATNFAKLTNKNFSGYRKNWLPGPMMKQQRFSKTASQNYKIPQGGNNSLLHYETRTTLDRRWSNFAPGTAMATAANDATDFSQAQLIFAGPNITGNTTTDANNLMFTSEDELRATNPRDTDLFGHLATNQQNATTVPTVDDVDGVGVYPGMVWQDRDIYYQGPIWAKIPHTDGHFHPSPLIGGFGLKSPPPQIFIKNTPVPANPATTFSPARINSFITQYSTGQVAVKIEWEIQKERSKRWNPEVQFTSNYGAQDSLLWAPDNAGAYKEPRAIGSRYLTNHL

SEQ ID NO: 5285 - protein, 736 aa, Artificial Sequence
  Description of Artificial Sequence: Synthetic polypeptide
MSFVDHPPDWLESIGDGFREFLGLEAGPPKPKANQQKQDNARGLVLPGYKYLGPGNGLDKGDPVNFADEVAREHDLSYQKQLEAGDNPYLKYNHADAEFQEKLASDTSFGGNLGKAVFQAKKRILEPLGLVETPDKTAPAAKKRPLEQSPQEPDSSSGVGKKGKQPARKRLNFDDEPGAGDGPPPEGPSSGAMSTETEMRAAAGGNGGDAGQGAEGVGNASGDWHCDSTWSESHVTTTSTRTWVLPTYNNHLYLRLGSSNASDTFNGFSTPWGYFDFNRFHCHFSPRDWQRLINNHWGLRPKSMQVRIFNIQVKEVTTSNGETTVSNNLTSTVQIFADSTYELPYVMDAGQEGSLPPFPNDVFMVPQYGYCGLVTGGSSQNQTDRNAFYCLEYFPSQMLRTGNNFEMVYKFENVPFHSMYAHSQSLDRLMNPLLDQYLWELQSTTSGGTLNQGNSATNFAKLTKTNFSGYRKNWLPGPMMKQQRFSKTASQNYKIPQGRNNSLLHYETRTTLDGRWSNFAPGTAMATAANDATDFSQAQLIFAGPNITGNTTTDANNLMFTSEDELRATNPRDTDLFGHLATNQQNATTVPTVDDVDGVGVYPGMVWQDRDIYYQGPIWAKIPHTDGHFHPSPLIGGFGLKSPPPQIFIKNTPVPANPATTFSPARINSFITQYSTGQVAVKIEWEIQKERSKRWNPEVQFTSNYGAQDSLLWAPDNAGAYKEPRAIGSRYLTNHL

SEQ ID NO: 5286 - DNA, 2214 bp, Artificial Sequence
  Description of Artificial Sequence: Synthetic polynucleotide
atggctgccgatggttatcttccagattggctcgaggacactctctctgaaggaataagacagtggtggaagctcaaacctggcccaccaccaccaaagcccgcagagcggcataaggacgacagcaggggtcttgtgcttcctgggtacaagtacctcggacccttcaacggactcgacaagggagagccggtcaacgaggcagacgccgcggccctcgagcacgacaaagcctacgaccggcagctcgacagcggagacaacccgtacctcaagtacaaccacgccgacgcggagtttcaggagcgccttaaagaagatacgtcttttgggggcaacctcgggcgagcagtcttccaggccaaaaagaggcttcttgaacctcttggtctggttgaggaagcggctaagacggctcctggaaagaagaggcctgtagagcagtctcctcaggaaccggactcctcctcgggcatcggcaagacaggccagcagcccgctaaaaagagactcaatttcggtcagactggcgacacagagtcagtcccagaccctcaaccaatcggagaacctcccgcagccccctcaggtgtgggatctcttacaatggcttcaggtggtggcgcaccagtggcagacaataacgaaggtgccgatggagtgggtagttcctcgggaaattggcattgcgattcccaatggctgggggacagagtcatcaccaccagcacccgaacctgggccctgcccacctacaacaatcacctctacaagcaaatctccaacgggacatcgggaggagccaccaacgacaacacctacttcggctacagcaccccctgggggtattttgactttaacagattccactgccacttttcaccacgtgactggcagcgactcatcaacaacaactggggattccggcccaagagactcagcttcaagctcttcaacatccaggtcaaggaggtcacgcagaatgaaggcaccaagaccatcgccaataaccttaccagcacggtccaggtcttcacggactcggagtaccagctgccgtacgttctcggctctgcccaccagggctgcctgcctccgttcccggcggacgtgttcatgattccccagtacggctacctaacactcaacaacggtagtcaggccgtgggacgctcctccttctactgcctggaatactttccttcgcagatgctgagaaccggcaacaacttccagtttacttacaccttcgaggacgtgcctttccacagcagctacgcccacagccagagcttggaccggctgatgaatcctctgattgaccagtacctgtactacttgtctcggactcaaacaacaggaggcacggcaaatacgcagactctgggcttcagccaaggtgggcctaatacaatggccaatcaggcaaagaactggctgccaggaccctgttaccgccaacaacgcgtctcaacgacaaccgggcaaaacaacaatagcaactttgcctggactgctgggaccaaataccatctgaatggaagaaattcattggctaatcctggcatcgctatggcaacacacaaagacgacaaggagcgtttttttcccagtaacgggatcctgatttttggcaaacaaaatgctgccagagacaatgcggattacagcgatgtcatgctcaccagcgaggaagaaatcaaaaccactaaccctgtggctacagaggaatacggtatcgtggcagataacttgcagcagcaaaacacggctcctcaaattggaactgtcaacagccagggggccttacccggtatggtttggcagaaccgggacgtgtacctgcagggtcccatctgggccaagattcctcacacggacggcaacttccacccgtctccgctgatgggcggctttggcctgaaacatcctccgcctcagatcctgatcaagaacacgcctgtacctgcggatcctccgaccaccttcaaccagtcaaagctgaactctttcatcacgcaatacagcaccggacaggtcagcgtggaaattgaatgggagctgcagaaggaaaacagcaagcgctggaaccccgagatccagtacacctccaactactacaaatctacaagtgtggactttgctgttaatacagaaggcgtgtactctgaaccccaccccattggcacccgttacctcacccgtcccctgtaa

SEQ ID NO: 5287 - protein, 737 aa, Artificial Sequence
  Description of Artificial Sequence: Synthetic polypeptide
MAADGYLPDWLEDTLSEGIRQWWKLKPGPPPPKPAERHKDDSRGLVLPGYKYLGPFNGLDKGEPVNEADAAALEHDKAYDRQLDSGDNPYLKYNHADAEFQERLKEDTSFGGNLGRAVFQAKKRLLEPLGLVEEAAKTAPGKKRPVEQSPQEPDSSSGIGKTGQQPAKKRLNFGQTGDTESVPDPQPIGEPPAAPSGVGSLTMASGGGAPVADNNEGADGVGSSSGNWHCDSQWLGDRVITTSTRTWALPTYNNHLYKQISNGTSGGATNDNTYFGYSTPWGYFDFNRFHCHFSPRDWQRLINNNWGFRPKRLSFKLFNIQVKEVTQNEGTKTIANNLTSTVQVFTDSEYQLPYVLGSAHQGCLPPFPADVFMIPQYGYLTLNNGSQAVGRSSFYCLEYFPSQMLRTGNNFQFTYTFEDVPFHSSYAHSQSLDRLMNPLIDQYLYYLSRTQTTGGTANTQTLGFSQGGPNTMANQAKNWLPGPCYRQQRVSTTTGQNNNSNFAWTAGTKYHLNGRNSLANPGIAMATHKDDKERFFPSNGILIFGKQNAARDNADYSDVMLTSEEEIKTTNPVATEEYGIVADNLQQQNTAPQIGTVNSQGALPGMVWQNRDVYLQGPIWAKIPHTDGNFHPSPLMGGFGLKHPPPQILIKNTPVPADPPTTFNQSKLNSFITQYSTGQVSVEIEWELQKENSKRWNPEIQYTSNYYKSTSVDFAVNTEGVYSEPHPIGTRYLTRPL

SEQ ID NO: 5288 - protein, 736 aa, Artificial Sequence
  Description of Artificial Sequence: Synthetic polypeptide
MAADGYLPDWLEDNLSEGIREWWDLKPGAPKPKANQQKQDDGRGLVLPGYKYLGPFNGLDKGEPVNAADAAALEHDKAYDQQLKAGDNPYLRYNHADAEFQERLQEDTSFGGNLGRAVFQAKKRVLEPLGLVEEGAKTAPGKKRPVEQSPQEPDSSSGIGKTGQQPAKKRLNFGQTGDTESVPDPQPIGEPPAAPSGVGSLTMASGGGAPVADNNEGADGVGSSSGNWHCDSQWLGDRVITTSTRTWALPTYNNHLYKQISSASTGASNDNHYFGYSTPWGYFDFNRFHCHFSPRDWQRLINNNWGFRPKRLNFKLFNIQVKEVTDNNGVKTIANNLTSTVQVFTDSDYQLPYVLGSAHQGCLPPFPADVFMIPQYGYLTLNNGSQAVGRSSFYCLEYFPSQMLRTGNNFQFTYTFEDVPFHSSYAHSQSLDRLMNPLIDQYLYYLSRTQTTGGTANTQTLGFSQGGPNTMANQAKNWLPGPCYRQQRVSTTTGQNNNSNFAWTAGTKYHLNGRNSLANPGIAMATHKDDKERFFPSNGILIFGKQNAARDNADYSDVMLTSEEEIKTTNPVATEEYGIVADNLQQQNTAPQIGTVNSQGALPGMVWQNRDVYLQGPIWAKIPHTDGNFHPSPLMGGFGLKHPPPQILIKNTPVPADPPTTFNQSKLNSFITQYSTGQVSVEIEWELQKENSKRWNPEIQYTSNYYKSTSVDFAVNTEGVYSEPHPIGTRYLTRPL

SEQ ID NO: 5289 - protein, 736 aa, Artificial Sequence
  Description of Artificial Sequence: Synthetic polypeptide
MAADGYLPDWLEDTLSEGIRQWWKLKPGPPPPKPAERHKDDSRGLVLPGYKYLGPFNGLDKGEPVNEADAAALEHDKAYDRQLDSGDNPYLKYNHADAEFQERLQGDTSFGGNLGRAVFQAKKRVLEPLGLVEEGAKTAPGKKRPVEQSPQEPDSSSGIGETGQQPAKKRLNFGQTGDSESVPDPQPLGEPPATPAAVGPTTMASGGGAPMADNNEGADGVGSSSGNWHCDSQWLGDRVITTSTRTWALPTYNNHLYKQISSASTGASNDNHYFGYSTPWGYFDFNRFHCHFSPRDWQRLINNNWGFRPKRLSFKLFNIQVKEVTDNNGVKTIANNLTSTVQVFTDSEYQLPYVLGSAHQGCLPPFPADVFMIPQYGYLTLNNGSQAVGRSSFYCLEYFPSQMLRTGNNFTFSYTFEDVPFHSSYAHSQSLDRLMNPLIDQYLYYLSRTQTTGGTANTQTLGFSQGGPNTMANQAKNWLPGPCYRQQRVSTTTGQNNNSNFAWTAGTKYHLNGRNSLANPGIAMATHKDDKERFFPSNGILIFGKQNAARDNADYSDVMLTSEEEIKTTNPVATEEYGIVADNLQQQNTAPQIGTVNSQGALPGMVWQNRDVYLQGPIWAKIPHTDGNFHPSPLMGGFGLKHPPPQILIKNTPVPADPPTTFNQSKLNSFITQYSTGQVSVEIEWELQKENSKRWNPEIQYTSNYYKSTSVDFAVNTEGVYSEPHPIGTRYLTRPL

SEQ ID NO: 5290 - DNA, 2181 bp, Artificial Sequence
  Description of Artificial Sequence: Synthetic polynucleotide
atgtcttttgttgatcaccctccagattggttggaagaagttggtgaaggtcttcgcgagtttttgggccttgaagcgggcccaccgaaaccaaaacccaatcagcagcatcaagatcaagcccgtggtcttgtgctgcctggttataactatctcggacccggaaacggtctcgatcgaggagagcctgtcaacagggcagacgaggtcgcgcgagagcacgacatctcgtacaacgagcagcttgaggcgggagacaacccctacctcaagtacaaccacgcggacgccgagtttcaggagaagctcgccgacgacacatccttcgggggaaacctcggaaaggcagtctttcaggccaagaaaagggttctcgaaccttttggcctggttgaagagggtgctaagacggcccctaccggaaagcggatagacgaccactttccaaaaagaaagaaggctcggaccgaagaggactccaagccttccacctcgtcagacgccgaagctggacccagcggatcccagcagctgcaaatcccagcacaaccagcctcaagtttgggagctgatacaatgtctgcgggaggtggcggcccattgggcgacaataaccaaggtgccgatggagtgggcaatgcctcgggagattggcattgcgattccacgtggatgggggacagagtcgtcaccaagtccacccgcacctgggtgctgcccagctacaacaaccaccagtaccgagagatcaaaagcggctccgtcgacggaagcaacgccaacgcctactttggatacagcaccccctgggggtactttgactttaaccgcttccacagccactggagcccccgagactggcaaagactcatcaacaactattggggcttcagaccccggtctctcagagtcaaaatcttcaacatccaagtcaaagaggtcacggtgcaggactccaccaccaccatcgccaacaacctcacctccaccgtccaagtgtttacggacgacgactaccaactcccgtacgtcgtcggcaacgggaccgagggatgcctgccggccttccccccgcaggtctttacgctgccgcagtacggctacgcgacgctgaaccgagacaacggagacaacccgacagagcggagcagcttcttttgcctagagtactttcccagcaagatgctgaggacgggcaacaactttgagtttacctacagctttgaagaggtgcccttccactgcagcttcgccccgagccagaacctctttaagctggccaacccgctggtggaccagtacctgtaccgcttcgtgagcacctcggccacgggcgccatccagttccaaaagaacctggcgggcagatacgccaacacctacaaaaactggttcccggggcccatgggccgaacccagggctggaacacgagctctggggtcagcagcaccaacagagtcagcgtcaacaacttttccgtctcaaaccggatgaacctggagggggccagctaccaagtgaacccccagcccaacgggatgacaaacacgctccaaggcagcaaccgctacgcgctggaaaacaccatgatcttcaacgctcaaaacgccacgccgggaactacctcggtgtacccagaggacaatctactgctgaccagcgagagcgagactcagcccgtcaaccgggtggcttacaacacgggcggtcagatggccaccaacgcccagaacgccaccacggctcccacggtcgggacctacaacctccaggaagtgcttcctggcagcgtatggatggagagggacgtgtacctccaaggacccatctgggccaagatcccagagacgggggcgcactttcacccctctccggccatgggcggattcggactcaaacacccgccgcccatgatgctcatcaaaaacacgccggtgcccggcaacatcaccagcttctcggacgtgcccgtcagcagcttcatcacccagtacagcaccgggcaggtcaccgtggagatggaatgggagctcaaaaaggaaaactccaagaggtggaacccagagatccagtacaccaacaactacaacgacccccagtttgtggactttgctccagacggctccggcgaatacagaaccaccagagccatcggaacccgatacctcacccgacccctt

SEQ ID NO: 5291 - protein, 726 aa, Artificial Sequence
  Description of Artificial Sequence: Synthetic polypeptide
MSFVDHPPDWLEEVGEGLREFLGLEAGPPKPKPNQQHQDQARGLVLPGYNYLGPGNGLDRGEPVNRADEVAREHDISYNEQLEAGDNPYLKYNHADAEFQEKLADDTSFGGNLGKAVFQAKKRVLEPFGLVEEGAKTAPTGKRIDDHFPKRKKARTEEDSKPSTSSDAEAGPSGSQQLQIPAQPASSLGADTMSAGGGGPLGDNNQGADGVGNASGDWHCDSTWMGDRVVTKSTRTWVLPSYNNHQYREIKSGSVDGSNANAYFGYSTPWGYFDFNRFHSHWSPRDWQRLINNYWGFRPRSLRVKIFNIQVKEVTVQDSTTTIANNLTSTVQVFTDDDYQLPYVVGNGTEGCLPAFPPQVFTLPQYGYATLNRDNGDNPTERSSFFCLEYFPSKMLRTGNNFEFTYSFEEVPFHCSFAPSQNLFKLANPLVDQYLYRFVSTSATGAIQFQKNLAGRYANTYKNWFPGPMGRTQGWNTSSGSSTNRVSVNNFSVSNRMNLEGASYQVNPQPNGMTNTLQGSNRYALENTMIFNAQNATPGTTSVYPEDNLLLTSESETQPVNRVAYNTGGQMATNAQNATTAPTVGTYNLQEVLPGSVWMERDVYLQGPIWAKIPETGAHFHPSPAMGGFGLKHPPPMMLIKNTPVPGNITSFSDVPVSSFITQYSTGQVTVEMEWELKKENSKRWNPEIQYTNNYNDPQFVDFAPDGSGEYRTTRAIGTRYLTRPL

SEQ ID NO: 5292 - protein, 735 aa, Artificial Sequence
  Description of Artificial Sequence: Synthetic polypeptide
MAADGYLPDWLEDTLSEGIRQWWKLKPGPPPPKPAERHKDDSRGLVLPGYKYLGPFNGLDKGEPVNEADAAALEHDKAYDRQLDSGDNPYLKYNHADAEFQERLKEDTSFGGNLGRAVFQAKKRILEPLGLVEEPVKTAPGKKRPVEHSPAEPDSSSGTGKSGQQPARKRLNFGQTGDADSVPDPQPLGQPPAAPSGLGTNTMASGSGAPMADNNEGADGVGNSSGNWHCDSTWMGDRVITTSTRTWALPTYNNHLYKQISSQSGASNDNHYFGYSTPWGYFDFNRFHCHFSPRDWQRLINNNWGFRPKRLSFKLFNIQVKEVTQNDGTTTIANNLTSTVQVFTDSEYQLPYVLGSAHQGCLPPFPADVFMVPQYGYLTLNNGSQAVGRSSFYCLEYFPSQMLRTGNNFTFSYTFEDVPFHSSYAHSQSLDRLMNPLIDQYLYYLSRTNTPSGTTTMSRLQFSQAGASDIRDQSRNWLPGPCYRQQRVSKTAADNNNSDYSWTGATKYHLNGRDSLVNPGPAMASHKDDEEKYFPQSGVLIFGKQDSGKTNVDIEKVMITDEEEIRTTNPVATEQYGSVSTNLQSGNTQAATSDVNTQGVLPGMVWQDRDVYLQGPIWAKIPHTDGHFHPSPLMGGFGLKHPPPQILIKNTPVPANPSTTFSAAKFASFITQYSTGQVSVEIEWELQKENSKRWNPEIQYTSNYNKSVNVDFTVDTNGVYSEPRPIGTRYLTRNL

SEQ ID NO: 5293 - DNA, 1803 bp, Bovine adeno-associated virus
acggcgcctgcggcaaaaaagaggcctctagagcagagtcctcaagagccagactcctcgagcggagttggcaagaaaggcaaacagcctgccagaaagagactcaactttgacgacgaacctggagccggagacgggcctcccccagaaggaccatcttccggagctatgtctactgagactgaaatgcgtgcagcagctggcggaaatggtggcgatgcgggacaaggtgccgagggagtgggtaatgcctccggtgattggcattgcgattccacttggtcagagagccacgtcaccaccacctcaacccgcacctgggtcctgccgacctacaacaaccacctgtacctgcggctcggctcgagcaacgccagcgacaccttcaacggattctccaccccctggggatactttgactttaaccgcttccactgccacttctcgccaagagactggcaaaggctcatcaacaaccactggggactgcgccccaaaagcatgcaagtccgcatcttcaacatccaagttaaggaggtcacgacgtctaacggggagacgaccgtatccaacaacctcaccagcacggtccagatctttgcggacagcacgtacgagctcccgtacgtgatggatgcaggtcaggagggcagcttgcctcctttccccaacgacgtgttcatggtgcctcagtacgggtactgcggactggtaaccggaggcagctctcaaaaccagacagacagaaatgccttctactgtctggagtactttcccagccagatgctgagaaccggaaacaactttgagatggtgtacaagtttgaaaacgtgcccttccactccatgtacgctcacagccagagcctggataggctgatgaacccgctgctggaccagtacctgtgggagctccagtctaccacctctggaggaactctcaaccagggcaattcagccaccaactttgccaagctgaccaaaacaaacttttctggctaccgcaaaaactggctcccggggcccatgatgaagcagcagagattctccaagactgccagtcaaaactacaagattccccagggaagaaacaacagtctgctccattatgagaccagaactaccctcgacggaagatggagcaattttgccccgggaacggccatggcaaccgcagccaacgacgccaccgacttctctcaggcccagctcatctttgcggggcccaacatcaccggcaacaccaccacagatgccaataacctgatgttcacttcagaagatgaacttagggccaccaacccccgggacactgacctgtttggccacctggcaaccaaccagcaaaacgccaccaccgttcctaccgtagacgacgtggacggagtcggcgtgtacccgggaatggtgtggcaggacagagacatttactaccaagggcccatttgggccaaaattccacacacggatggacactttcacccgtctcctctcattggcggatttggactgaaaagcccgcctccacaaatattcatcaaaaacactcctgtacccgccaatcccgcaacgaccttctctccggccagaatcaacagcttcatcacccagtacagcaccggacaggtggctgtcaaaatagaatgggaaatccagaaggagcggtccaagagatggaacccagaggtccagttcacgtccaactacggagcacaggactcgcttctctgggctcccgacaacgccggagcctacaaagagcccagggccattggatcccgatacctcaccaaccacctctag

SEQ ID NO: 5294 - DNA, 1617 bp, Bovine adeno-associated virus
atgcgtgcagcagctggcggaaatggtggcgatgcgggacaaggtgccgagggagtgggtaatgcctccggtgattggcattgcgattccacttggtcagagagccacgtcaccaccacctcaacccgcacctgggtcctgccgacctacaacaaccacctgtacctgcggctcggctcgagcaacgccagcgacaccttcaacggattctccaccccctggggatactttgactttaaccgcttccactgccacttctcgccaagagactggcaaaggctcatcaacaaccactggggactgcgccccaaaagcatgcaagtccgcatcttcaacatccaagttaaggaggtcacgacgtctaacggggagacgaccgtatccaacaacctcaccagcacggtccagatctttgcggacagcacgtacgagctcccgtacgtgatggatgcaggtcaggagggcagcttgcctcctttccccaacgacgtgttcatggtgcctcagtacgggtactgcggactggtaaccggaggcagctctcaaaaccagacagacagaaatgccttctactgtctggagtactttcccagccagatgctgagaaccggaaacaactttgagatggtgtacaagtttgaaaacgtgcccttccactccatgtacgctcacagccagagcctggataggctgatgaacccgctgctggaccagtacctgtgggagctccagtctaccacctctggaggaactctcaaccagggcaattcagccaccaactttgccaagctgaccaaaacaaacttttctggctaccgcaaaaactggctcccggggcccatgatgaagcagcagagattctccaagactgccagtcaaaactacaagattccccagggaagaaacaacagtctgctccattatgagaccagaactaccctcgacggaagatggagcaattttgccccgggaacggccatggcaaccgcagccaacgacgccaccgacttctctcaggcccagctcatctttgcggggcccaacatcaccggcaacaccaccacagatgccaataacctgatgttcacttcagaagatgaacttagggccaccaacccccgggacactgacctgtttggccacctggcaaccaaccagcaaaacgccaccaccgttcctaccgtagacgacgtggacggagtcggcgtgtacccgggaatggtgtggcaggacagagacatttactaccaagggcccatttgggccaaaattccacacacggatggacactttcacccgtctcctctcattggcggatttggactgaaaagcccgcctccacaaatattcatcaaaaacactcctgtacccgccaatcccgcaacgaccttctctccggccagaatcaacagcttcatcacccagtacagcaccggacaggtggctgtcaaaatagaatgggaaatccagaaggagcggtccaagagatggaacccagaggtccagttcacgtccaactacggagcacaggactcgcttctctgggctcccgacaacgccggagcctacaaagagcccagggccattggatcccgatacctcaccaaccacctctag

SEQ ID NO: 5295 - DNA, 1173 bp, Bovine adeno-associated virus
atggcgctggtaagctggctggtggaacatggcatcacttccgagaagcagtggattcaggagaatcaggagagctacctgtccttcaactccacgggaaactctcggagccagattaaagccgcgcttgacaacgcgtcaaaaattatgagtctgaccaaatctgcctcagactatctcgtgggacagactgttccagaggacatttctgaaaacagaatctggcagatttttgatctcaacggctacgacccggcatacgcgggctctgttctctacggctggtgcactcgcgcctttggaaagaggaacaccgtctggctgtatggacccgcgaccaccggaaagaccaacatcgcggaagccatctctcacaccgtgcccttttatggctgtgtgaactggactaatgagaactttccctttaatgactgtgtggaaaaaatgttgatctggtgggaggagggaaagatgaccagcaaggtggtggaacccgccaaggccatcttgggggggtctagagtacgagtggatcaaaaatgtaaatcctctgtacaagtagactctaccccggtgattatcacctccaatactaacatgtgtgtggtggtggatgggaactccacgacctttgaacaccagcagccgctggaagaccgcatgttcagatttgaactcatgcggcggctcccgccagattttggcaagattaccaagcaggaagtcaaagacttttttgcttgggcaaaggtcaaccaggtgccggtgactcacgagtttatggttcccaagaaagtggcgggaactgagagggcggagacttctagaaaacgcccactggatgacgtcaccaataccaactataaaagtccggagaagcgggcccggctctcagttgttcctgagacgcctcgcagttcagacgtgcctgtagagcccgctcctctgcgacctctcaactggtcttccaggtatgaatgcagatgtgactatcatgctaaatttgactctgtaacgggggaatgtgacgagtgtgaatatttgaatcggggcaaaaatggctgtatctttcataatgctacacattgtcaaatttgtcacgctgttcctccatgggaaaaggaaaatgtgtcagattttaatgattttgatgactgtaataaagagcagtaa

SEQ ID NO: 5296 - DNA, 1833 bp, Bovine adeno-associated virus
atggctaccttctatgaagtcattgttcgcgttccatttgatgtggaagagcacctgcctggaatttctgacaactttgtagactgggtaactggtcaaatttgggagctgcctcccgagtcagatttgaatttgactctgattgagcagcctcagctgacggtggctgacagaattcgccgcgtgttcctgtacgagtggaacaaattttccaagcaggagagcaaattctttgtgcagtttgaaaagggatctgaatattttcatctgcacacgctcgtggagacctccggcatctcttctatggtccttggccgctacgtgagtcagattcgcgcccagctggtgaaggtggtgttccagaacattgagccgcggattaacgactgggtcgccatcaccaaggtaaagaagggcggagccaataaggtggtggattctgggtatattcccgcctacctgctgccgaaggtccaaccagagcttcagtgggcgtggactaacctcgaagagtataaattggccgccctcaatctggaggagcgcaaacggctcgtcgctcagtttcagcttgagtcctcgcagcgctcgcaagaggcatcttcccagagggacgtttcggctgacccggtcatcaagagcaagacttcccagaaatacatggcgctggtaagctggctggtggaacatggcatcacttccgagaagcagtggattcaggagaatcaggagagctacctgtccttcaactccacgggaaactctcggagccagattaaagccgcgcttgacaacgcgtcaaaaattatgagtctgaccaaatctgcctcagactatctcgtgggacagactgttccagaggacatttctgaaaacagaatctggcagatttttgatctcaacggctacgacccggcatacgcgggctctgttctctacggctggtgcactcgcgcctttggaaagaggaacaccgtctggctgtatggacccgcgaccaccggaaagaccaacatcgcggaagccatctctcacaccgtgcccttttatggctgtgtgaactggactaatgagaactttccctttaatgactgtgtggaaaaaatgttgatctggtgggaggagggaaagatgaccagcaaggtggtggaacccgccaaggccatcttgggggggtctagagtacgagtggatcaaaaatgtaaatcctctgtacaagtagactctaccccggtgattatcacctccaatactaacatgtgtgtggtggtggatgggaactccacgacctttgaacaccagcagccgctggaagaccgcatgttcagatttgaactcatgcggcggctcccgccagattttggcaagattaccaagcaggaagtcaaagacttttttgcttgggcaaaggtcaaccaggtgccggtgactcacgagtttatggttcccaagaaagtggcgggaactgagagggcggagacttctagaaaacgcccactggatgacgtcaccaataccaactataaaagtccggagaagcgggcccggctctcagttgttcctgagacgcctcgcagttcagacgtgcctgtagagcccgctcctctgcgacctctcaactggtcttccaggtatgaatgcagatgtgactatcatgctaaatttgactctgtaacgggggaatgtgacgagtgtgaatatttgaatcggggcaaaaatggctgtatctttcataatgctacacattgtcaaatttgtcacgctgttcctccatgggaaaaggaaaatgtgtcagattttaatgattttgatgactgtaataaagagcagtaa

SEQ ID NO: 5297 - DNA, 2211 bp, Bovine adeno-associated virus
atgtcttttgttgaccaccctccagattggttggaatcgatcggcgacggctttcgtgaatttctcggccttgaggcgggtcccccgaaacccaaggccaatcaacagaagcaagataacgctcgaggtcttgtgcttcctgggtacaagtatcttggtcctgggaacggccttgataagggcgatcctgtcaattttgctgacgaggttgcccgagagcacgacctctcctaccagaaacagcttgaggcgggcgataacccttacctcaagtacaaccacgcggacgcagagtttcaggagaaactcgcttctgacacttcttttgggggaaaccttgggaaggctgttttccaggctaaaaagaggattctcgaacctcttggcctggttgagacgccggataaaacggcgcctgcggcaaaaaagaggcctctagagcagagtcctcaagagccagactcctcgagcggagttggcaagaaaggcaaacagcctgccagaaagagactcaactttgacgacgaacctggagccggagacgggcctcccccagaaggaccatcttccggagctatgtctactgagactgaaatgcgtgcagcagctggcggaaatggtggcgatgcgggacaaggtgccgagggagtgggtaatgcctccggtgattggcattgcgattccacttggtcagagagccacgtcaccaccacctcaacccgcacctgggtcctgccgacctacaacaaccacctgtacctgcggctcggctcgagcaacgccagcgacaccttcaacggattctccaccccctggggatactttgactttaaccgcttccactgccacttctcgccaagagactggcaaaggctcatcaacaaccactggggactgcgccccaaaagcatgcaagtccgcatcttcaacatccaagttaaggaggtcacgacgtctaacggggagacgaccgtatccaacaacctcaccagcacggtccagatctttgcggacagcacgtacgagctcccgtacgtgatggatgcaggtcaggagggcagcttgcctcctttccccaacgacgtgttcatggtgcctcagtacgggtactgcggactggtaaccggaggcagctctcaaaaccagacagacagaaatgccttctactgtctggagtactttcccagccagatgctgagaaccggaaacaactttgagatggtgtacaagtttgaaaacgtgcccttccactccatgtacgctcacagccagagcctggataggctgatgaacccgctgctggaccagtacctgtgggagctccagtctaccacctctggaggaactctcaaccagggcaattcagccaccaactttgccaagctgaccaaaacaaacttttctggctaccgcaaaaactggctcccggggcccatgatgaagcagcagagattctccaagactgccagtcaaaactacaagattccccagggaagaaacaacagtctgctccattatgagaccagaactaccctcgacggaagatggagcaattttgccccgggaacggccatggcaaccgcagccaacgacgccaccgacttctctcaggcccagctcatctttgcggggcccaacatcaccggcaacaccaccacagatgccaataacctgatgttcacttcagaagatgaacttagggccaccaacccccgggacactgacctgtttggccacctggcaaccaaccagcaaaacgccaccaccgttcctaccgtagacgacgtggacggagtcggcgtgtacccgggaatggtgtggcaggacagagacatttactaccaagggcccatttgggccaaaattccacacacggatggacactttcacccgtctcctctcattggcggatttggactgaaaagcccgcctccacaaatattcatcaaaaacactcctgtacccgccaatcccgcaacgaccttctctccggccagaatcaacagcttcatcacccagtacagcaccggacaggtggctgtcaaaatagaatgggaaatccagaaggagcggtccaagagatggaacccagaggtccagttcacgtccaactacggagcacaggactcgcttctctgggctcccgacaacgccggagcctacaaagagcccagggccattggatcccgatacctcaccaaccacctctag

SEQ ID NO: 5298 - DNA, 4694 bp, Bovine adeno-associated virus
gtggcactcccccccctgtcgcgttcgctcgttcgctggctcgattgggggggtggcagctcaaagagctgccagacgacggccctctgggccgtcgcccccccaatcgagccagcgaacgagcgaacgcgacaggggggggagtgccacactctctagcaagggggttttgtaggtggtgatgtcattgttgatgtcattatagttgtcacgcgatagttaatgattaacagtcatgtgatgtgtgttatccaataggatgaaagcgcgcgaatgagatctcgcgagacttccggggtataaaaggggtgagtgaacgagcccgccgccattctctgctctggactgctagaggaccctcgctgccatggctaccttctatgaagtcattgttcgcgttccatttgatgtggaagagcacctgcctggaatttctgacaactttgtagactgggtaactggtcaaatttgggagctgcctcccgagtcagatttgaatttgactctgattgagcagcctcagctgacggtggctgacagaattcgccgcgtgttcctgtacgagtggaacaaattttccaagcaggagagcaaattctttgtgcagtttgaaaagggatctgaatattttcatctgcacacgctcgtggagacctccggcatctcttctatggtccttggccgctacgtgagtcagattcgcgcccagctggtgaaggtggtgttccagaacattgagccgcggattaacgactgggtcgccatcaccaaggtaaagaagggcggagccaataaggtggtggattctgggtatattcccgcctacctgctgccgaaggtccaaccagagcttcagtgggcgtggactaacctcgaagagtataaattggccgccctcaatctggaggagcgcaaacggctcgtcgctcagtttcagcttgagtcctcgcagcgctcgcaagaggcatcttcccagagggacgtttcggctgacccggtcatcaagagcaagacttcccagaaatacatggcgctggtaagctggctggtggaacatggcatcacttccgagaagcagtggattcaggagaatcaggagagctacctgtccttcaactccacgggaaactctcggagccagattaaagccgcgcttgacaacgcgtcaaaaattatgagtctgaccaaatctgcctcagactatctcgtgggacagactgttccagaggacatttctgaaaacagaatctggcagatttttgatctcaacggctacgacccggcatacgcgggctctgttctctacggctggtgcactcgcgcctttggaaagaggaacaccgtctggctgtatggacccgcgaccaccggaaagaccaacatcgcggaagccatctctcacaccgtgcccttttatggctgtgtgaactggactaatgagaactttccctttaatgactgtgtggaaaaaatgttgatctggtgggaggagggaaagatgaccagcaaggtggtggaacccgccaaggccatcttgggggggtctagagtacgagtggatcaaaaatgtaaatcctctgtacaagtagactctaccccggtgattatcacctccaatactaacatgtgtgtggtggtggatgggaactccacgacctttgaacaccagcagccgctggaagaccgcatgttcagatttgaactcatgcggcggctcccgccagattttggcaagattaccaagcaggaagtcaaagacttttttgcttgggcaaaggtcaaccaggtgccggtgactcacgagtttatggttcccaagaaagtggcgggaactgagagggcggagacttctagaaaacgcccactggatgacgtcaccaataccaactataaaagtccggagaagcgggcccggctctcagttgttcctgagacgcctcgcagttcagacgtgcctgtagagcccgctcctctgcgacctctcaactggtcttccaggtatgaatgcagatgtgactatcatgctaaatttgactctgtaacgggggaatgtgacgagtgtgaatatttgaatcggggcaaaaatggctgtatctttcataatgctacacattgtcaaatttgtcacgctgttcctccatgggaaaaggaaaatgtgtcagattttaatgattttgatgactgtaataaagagcagtaaataaagtgagtagtcatgtcttttgttgaccaccctccagattggttggaatcgatcggcgacggctttcgtgaatttctcggccttgaggcgggtcccccgaaacccaaggccaatcaacagaagcaagataacgctcgaggtcttgtgcttcctgggtacaagtatcttggtcctgggaacggccttgataagggcgatcctgtcaattttgctgacgaggttgcccgagagcacgacctctcctaccagaaacagcttgaggcgggcgataacccttacctcaagtacaaccacgcggacgcagagtttcaggagaaactcgcttctgacacttcttttgggggaaaccttgggaaggctgttttccaggctaaaaagaggattctcgaacctcttggcctggttgagacgccggataaaacggcgcctgcggcaaaaaagaggcctctagagcagagtcctcaagagccagactcctcgagcggagttggcaagaaaggcaaacagcctgccagaaagagactcaactttgacgacgaacctggagccggagacgggcctcccccagaaggaccatcttccggagctatgtctactgagactgaaatgcgtgcagcagctggcggaaatggtggcgatgcgggacaaggtgccgagggagtgggtaatgcctccggtgattggcattgcgattccacttggtcagagagccacgtcaccaccacctcaacccgcacctgggtcctgccgacctacaacaaccacctgtacctgcggctcggctcgagcaacgccagcgacaccttcaacggattctccaccccctggggatactttgactttaaccgcttccactgccacttctcgccaagagactggcaaaggctcatcaacaaccactggggactgcgccccaaaagcatgcaagtccgcatcttcaacatccaagttaaggaggtcacgacgtctaacggggagacgaccgtatccaacaacctcaccagcacggtccagatctttgcggacagcacgtacgagctcccgtacgtgatggatgcaggtcaggagggcagcttgcctcctttccccaacgacgtgttcatggtgcctcagtacgggtactgcggactggtaaccggaggcagctctcaaaaccagacagacagaaatgccttctactgtctggagtactttcccagccagatgctgagaaccggaaacaactttgagatggtgtacaagtttgaaaacgtgcccttccactccatgtacgctcacagccagagcctggataggctgatgaacccgctgctggaccagtacctgtgggagctccagtctaccacctctggaggaactctcaaccagggcaattcagccaccaactttgccaagctgaccaaaacaaacttttctggctaccgcaaaaactggctcccggggcccatgatgaagcagcagagattctccaagactgccagtcaaaactacaagattccccagggaagaaacaacagtctgctccattatgagaccagaactaccctcgacggaagatggagcaattttgccccgggaacggccatggcaaccgcagccaacgacgccaccgacttctctcaggcccagctcatctttgcggggcccaacatcaccggcaacaccaccacagatgccaataacctgatgttcacttcagaagatgaacttagggccaccaacccccgggacactgacctgtttggccacctggcaaccaaccagcaaaacgccaccaccgttcctaccgtagacgacgtggacggagtcggcgtgtacccgggaatggtgtggcaggacagagacatttactaccaagggcccatttgggccaaaattccacacacggatggacactttcacccgtctcctctcattggcggatttggactgaaaagcccgcctccacaaatattcatcaaaaacactcctgtacccgccaatcccgcaacgaccttctctccggccagaatcaacagcttcatcacccagtacagcaccggacaggtggctgtcaaaatagaatgggaaatccagaaggagcggtccaagagatggaacccagaggtccagttcacgtccaactacggagcacaggactcgcttctctgggctcccgacaacgccggagcctacaaagagcccagggccattggatcccgatacctcaccaaccacctctagcccaattctgttgcataccctcaataaaccgtgtattcgtttcagtaaaatactgcctcttgtggtcattcggcgtacaacagcttacaacaacaacaaaacccccttgctagagagtgtggcactcccccccctgtcgcgttcgctcgttcgctggctcgattgggggggtggcagctcaaagagctgccagacgacggccctctgggccgtcgcccccccaatcgagccagcgaacgagcgaacgcgacaggggggggagtgccac

SEQ ID NO: 5299 - protein, 390 aa, Bovine adeno-associated virus
MALVSWLVEHGITSEKQWIQENQESYLSFNSTGNSRSQIKAALDNASKIMSLTKSASDYLVGQTVPEDISENRIWQIFDLNGYDPAYAGSVLYGWCTRAFGKRNTVWLYGPATTGKTNIAEAISHTVPFYGCVNWTNENFPFNDCVEKMLIWWEEGKMTSKVVEPAKAILGGSRVRVDQKCKSSVQVDSTPVIITSNTNMCVVVDGNSTTFEHQQPLEDRMFRFELMRRLPPDFGKITKQEVKDFFAWAKVNQVPVTHEFMVPKKVAGTERAETSRKRPLDDVTNTNYKSPEKRARLSVVPETPRSSDVPVEPAPLRPLNWSSRYECRCDYHAKFDSVTGECDECEYLNRGKNGCIFHNATHCQICHAVPPWEKENVSDFNDFDDCNKEQ

SEQ ID NO: 5300 - protein, 610 aa, Bovine adeno-associated virus
MATFYEVIVRVPFDVEEHLPGISDNFVDWVTGQIWELPPESDLNLTLIEQPQLTVADRIRRVFLYEWNKFSKQESKFFVQFEKGSEYFHLHTLVETSGISSMVLGRYVSQIRAQLVKVVFQNIEPRINDWVAITKVKKGGANKVVDSGYIPAYLLPKVQPELQWAWTNLEEYKLAALNLEERKRLVAQFQLESSQRSQEASSQRDVSADPVIKSKTSQKYMALVSWLVEHGITSEKQWIQENQESYLSFNSTGNSRSQIKAALDNASKIMSLTKSASDYLVGQTVPEDISENRIWQIFDLNGYDPAYAGSVLYGWCTRAFGKRNTVWLYGPATTGKTNIAEAISHTVPFYGCVNWTNENFPFNDCVEKMLIWWEEGKMTSKVVEPAKAILGGSRVRVDQKCKSSVQVDSTPVIITSNTNMCVVVDGNSTTFEHQQPLEDRMFRFELMRRLPPDFGKITKQEVKDFFAWAKVNQVPVTHEFMVPKKVAGTERAETSRKRPLDDVTNTNYKSPEKRARLSVVPETPRSSDVPVEPAPLRPLNWSSRYECRCDYHAKFDSVTGECDECEYLNRGKNGCIFHNATHCQICHAVPPWEKENVSDFNDFDDCNKEQ

SEQ ID NO: 5301 - protein, 736 aa, Bovine adeno-associated virus; identical to SEQ ID NO: 5285

SEQ ID NO: 5302 - protein, 600 aa, Bovine adeno-associated virus
TAPAAKKRPLEQSPQEPDSSSGVGKKGKQPARKRLNFDDEPGAGDGPPPEGPSSGAMSTETEMRAAAGGNGGDAGQGAEGVGNASGDWHCDSTWSESHVTTTSTRTWVLPTYNNHLYLRLGSSNASDTFNGFSTPWGYFDFNRFHCHFSPRDWQRLINNHWGLRPKSMQVRIFNIQVKEVTTSNGETTVSNNLTSTVQIFADSTYELPYVMDAGQEGSLPPFPNDVFMVPQYGYCGLVTGGSSQNQTDRNAFYCLEYFPSQMLRTGNNFEMVYKFENVPFHSMYAHSQSLDRLMNPLLDQYLWELQSTTSGGTLNQGNSATNFAKLTKTNFSGYRKNWLPGPMMKQQRFSKTASQNYKIPQGRNNSLLHYETRTTLDGRWSNFAPGTAMATAANDATDFSQAQLIFAGPNITGNTTTDANNLMFTSEDELRATNPRDTDLFGHLATNQQNATTVPTVDDVDGVGVYPGMVWQDRDIYYQGPIWAKIPHTDGHFHPSPLIGGFGLKSPPPQIFIKNTPVPANPATTFSPARINSFITQYSTGQVAVKIEWEIQKERSKRWNPEVQFTSNYGAQDSLLWAPDNAGAYKEPRAIGSRYLTNHL

(The sequence listing continues in the following parts.)

1. A method for editing a Laminin, Alpha 2 (LAMA2) gene in a cell by genome editing comprising: introducing into the cell one or more deoxyribonucleic acid (DNA) endonucleases to effect one or more single-strand breaks (SSBs) or double-strand breaks (DSBs) within or near the LAMA2 gene or LAMA2 regulatory elements that results in a permanent correction of one or more mutations or replacement of one or more exons and/or introns within or near the LAMA2 gene, thereby restoring the LAMA2 protein activity.

2. (canceled)

3. An ex vivo method for treating a patient having a LAMA2 related condition or disorder comprising:
editing a muscle cell or muscle precursor cell according to the method of claim 1; and
implanting the edited muscle cell or muscle precursor cell into the patient.

4.-8. (canceled)

9. An ex vivo method for treating a patient having a LAMA2 related condition or disorder comprising:
(a) editing a patient specific induced pluripotent stem cell (iPSC) or a mesenchymal stem cell according to the method of claim 1;
(b) differentiating the edited cell of (a) into a skeletal muscle cell, a smooth muscle cell, a cardiac muscle cell or a Pax7+ myocyte progenitor cell; and
(c) implanting the skeletal muscle cell, smooth muscle cell, cardiac muscle cell or Pax7+ myocyte progenitor cell into the patient.

10.-19. (canceled)

20. An in vivo method for treating a patient with a LAMA2 related condition or disorder comprising: editing the LAMA2 gene in a cell of the patient according to the method of claim 1, wherein the cell is a muscle cell or muscle precursor cell.

21.-32. (canceled)

33. The method of claim 1, wherein the one or more DNA endonuclease is selected from any of those sequences disclosed in SEQ ID NOs: 1-620 or variants having at least 90% homology to any of those sequences disclosed in SEQ ID NOs: 1-620.

34. The method of claim 33, wherein the one or more DNA endonuclease is provided as:
one or more proteins or polypeptides; or
one or more polynucleotide encoding the one or more DNA endonuclease, wherein the one or more polynucleotide is codon optimized, and when the one or more polynucleotide is one or more ribonucleic acid (RNA), the one or more RNA is optionally chemically modified, optionally in the coding region.

35. The method of claim 33, wherein the one or more DNA endonuclease is flanked at the N-terminus, the C-terminus, or both the N-terminus and C-terminus by one or more nuclear localization signals (NLSs).

36.-42. (canceled)

43. The method of claim 34, wherein the method further comprises: introducing into the cell one or more gRNA or one or more sgRNA, wherein the one or more gRNA or one or more sgRNA comprises a spacer sequence that is complementary to a DNA sequence within or near exon 1, intron 1, exon 2, intron 2, exon 3, intron 3, exon 4, intron 4, exon 5, intron 5, exon 6, intron 6, exon 7, intron 7, exon 8, intron 8, exon 9, intron 9, exon 10, intron 10, exon 11, intron 11, exon 12, intron 12, exon 13, intron 13, exon 14, intron 14, exon 15, intron 15, exon 16, intron 16, exon 17, intron 17, exon 18, intron 18, exon 19, intron 19, exon 20, intron 20, exon 21, intron 21, exon 22, intron 22, exon 23, intron 23, exon 24, intron 24, exon 25, intron 25, exon 26, intron 26, exon 27, intron 27, exon 28, intron 28, exon 29, intron 29, exon 30, intron 30, exon 31, intron 31, exon 32, intron 32, exon 33, intron 33, exon 34, intron 34, exon 35, intron 35, exon 36, intron 36, exon 37, intron 37, exon 38, intron 38, exon 39, intron 39, exon 40, intron 40, exon 41, intron 41, exon 42, intron 42, exon 43, intron 43, exon 44, intron 44, exon 45, intron 45, exon 46, intron 46, exon 47, intron 47, exon 48, intron 48, exon 49, intron 49, exon 50, intron 50, exon 51, intron 51, exon 52, intron 52, exon 53, intron 53, exon 54, intron 54, exon 55, intron 55, exon 56, intron 56, exon 57, intron 57, exon 58, intron 58, exon 59, intron 59, exon 60, intron 60, exon 61, intron 61, exon 62, intron 62, exon 63, intron 63, exon 64, intron 64, or exon 65 of the LAMA2 gene.

44. The method of claim 43, wherein the one or more gRNA or one or more sgRNA is:
chemically modified, wherein the one or more modified sgRNA comprises three 2′-O-methyl-phosphorothioate residues at or near each of its 5′ and 3′ ends;
pre-complexed with the one or more DNA endonuclease to form one or more ribonucleoproteins (RNPs); or
a combination thereof.

45.-49. (canceled)

50. The method of claim 43, wherein:
the one or more DNA endonuclease is formulated in a liposome or lipid nanoparticle;
the one or more DNA endonuclease is formulated in a liposome or lipid nanoparticle which also comprises the one or more gRNA or one or more sgRNA;
the one or more DNA endonuclease is encoded in an AAV vector particle;
the one or more gRNA or one or more sgRNA is encoded in an AAV vector particle; or the one or more DNA endonuclease is encoded in an AAV vector particle which also encodes the one or more gRNA or one or more sgRNA.

51.-55. (canceled)

56. The method of claim 43, wherein the method further comprises: introducing into the cell a donor template comprising at least a portion of the wild-type or corrected LAMA2 gene, wherein the donor template:
comprises homologous arms to the genomic locus of the LAMA2 gene;
is either a single or double stranded polynucleotide;
template is encoded in an AAV vector particle; or
a combination thereof.

57. The method of claim 56, wherein the at least a portion of the wild-type or corrected LAMA2 gene comprises one or more sequences selected from the group consisting of a LAMA2 exon, a LAMA2 intron, and a sequence comprising an exon:intron junction of LAMA2.

58.-60. (canceled)

61. The method of claim 56, wherein the one or more polynucleotide encoding one or more DNA endonuclease is formulated into a lipid nanoparticle, and the one or more gRNA or one or more sgRNA is delivered to the cell ex vivo by electroporation and the donor template is delivered to the cell by an adeno-associated virus (AAV) vector,. or the one or more polynucleotide encoding one or more DNA endonuclease is formulated into a liposome or lipid nanoparticle which also comprises the one or more gRNA or one or more sgRNA and the donor template.

62.-63. (canceled)

64. A single-molecule guide RNA comprising at least a spacer sequence that is an RNA sequence corresponding to any one of SEQ ID NOs: 5305-415,443.

65. The single-molecule guide RNA of claim 64, wherein the single-molecule guide RNA:
further comprises a spacer extension region;
further comprises a tracrRNA extension region;
is chemically modified; or
a combination thereof.

66.-67. (canceled)

68. The single-molecule guide RNA of claim 65 pre-complexed with a DNA endonuclease, wherein the DNA endonuclease is a Cas9 or Cpf1 endonuclease.

69. (canceled)

70. The single-molecule guide RNA of claim 68, wherein the Cas9 or Cpf1 endonuclease is selected from the group consisting of: S. pyogenes Cas9, S. aureus Cas9, N. meningitidis Cas9, S. thermophilus CRISPR1 Cas9, S. thermophilus CRISPR 3 Cas9, T. denticola Cas9, L. bacterium ND2006 Cpf1 and Acidaminococcus sp. BV3L6 Cpf1, and variants having at least 90% homology to the endonucleases.

71. The single-molecule guide RNA of claim 70, wherein the Cas9 or Cpf1 endonuclease comprises one or more nuclear localization signals (NLSs), wherein at least one NLS is at or within 50 amino acids of the amino-terminus of the Cas9 or Cpf1 endonuclease and/or at least one NLS is at or within 50 amino acids of the carboxy-terminus of the Cas9 or Cpf1 endonuclease.

72. (canceled)

73. A DNA encoding the single-molecule guide RNA of claim 64.

74. (canceled)

75. A therapeutic for treating a patient with an LAMA2 related condition or disorder formed by the method comprising:
introducing one or more DNA endonucleases;
introducing one or more gRNA or one or more sgRNA for editing a LAMA2 gene;
wherein the one or more gRNAs or sgRNAs comprise a spacer sequence selected from the group consisting of nucleic acid sequences in SEQ ID NOs: 5305-415,443 of the Sequence Listing.

76. (canceled)
